United States Patent Application Publication US 2026/0324648 A1 - sequence listing, part 3

SEQ ID NO: 16 - DNA, 4275344 bp, synthetic construct (residues 1-2,137,672 of 4,275,344)
  source 1..4275344: mol_type = other DNA
ttcgattctactaaggctccatgctcttccgcttctacaaactcgccattctcattcagcgaataccaaacatccggctcaattccgttctcgcctactttactggcacggatatgaattagttcgccttcgccatttcggtagcacaggacgattgcgccgctttctgacgctttagcctttccaccatcaccgaatgaagccgctacagattgcgatccagacacctctgccgctgaccagtcgccagtgttggttgccgctgaccggttgccagtgttggttgccgctgactggtagccagtgttggttgccgctgaccggtagccagtgttggttgccgctgaccagttgccagtgttggttgccgctgactggtagccagtgttggttgccgctgaccagttgccagtgttggttgccgctgaccggtagccagtgttggttgccgctgaccggtcgccagtgttggttgccgctgactggtagccagtgttggttgccgctgaccggtagccagtgttggttgccgctgaccagtagccagtgttgattgccgctgactggttgccagtgttggttgccgctgaccggtcgccagtgttggttgccgctgactggtagccagtgttggttgccgctgaccagtcgccagtgttggttgccgctgactggtagccagtgttggttgccgctgaccagttgccagtgttggttgccgctgactggtttccggtcatgatctgctgttcaagcgacttatcaactttgctccagatccaatcaatcccgcgctgaataaactgagggagggttagttcttctgtgatggttatgctggcgcttgcgatttttgtatcgccatcatcttcgcggtcaataacaccaaatgattcagttactgcataccggctatttgttggcgggtaatatccgaaaacatcaaatgggcattcacaagcgtggaagccagagccgcatgcctcgaccttgccctcatgcgtatacgttttgccaatttcgaactggtagccacggcactgaagattttggtcgaagcctttaaaggtaataactgtttctttgctcatgctgcttccttgaatttttggaataaaaaagccgcattaagcagctcgttgtttgtttcagtggtcttattgctgccaccggttaagtggcaggggtaagatcactggggttccgagatgaaatctaatacttcctgtaaatcaccgtcacacagagctacatatccatccgcatgcattcgctgaagccattcaatgcttatgtttcgatattgactcatcattcattcctcatttaccagccaataaaaaaggccgcgttatgcagccttgaatcctgtaacctcaatccgacatatcggataggtataaagcttgttgtcctgaacaatcttctgcgcagcttccatgctgtcagcgctgtcacagaacttaatgttctcgtaatacgcgccgtcgtcgttatccggcttgccagccagaacagtgaaagaaagtgtcattctcttaccccttaaccatttacccgccaataaaaaaggccacctaagtgacctctataatttgagctgggatatttatccacgcccagccgtggtttccctgctttccacagtcaaaggaaattgatatgttggttattccacagtcaatatagggatttagaaatggcagattttactgttagggttgagttgcataatgctgacgctgatgactacgaaactcttcacgaaaaaatgaaygcaaaggggtatcaaaaagaaataaccacagatggtaaaacttataaattaccgaatgctgaatatgtctgtagtaaagatttatctacacctgaaattcgtgatgatgtactgagaattgcaaactcggtaaagccaaagtctgacgtattggttacaaaatctagcggaagagcatggagccttagtagaryctamtaatcttgaccgagcttctccttttcctcattattttctgtggaataaagctcaataaatgcctctcttacctctcgggccagtgttttaactggctctatttgctcatccatccccatacctaaagtagaaagtctgtttgaaagcgtttgggctgcgattaactgcatttcaagtggtaactcgacaaatctcataactacctctctgtttaaataagttgaatgctgctacttaacaatgtgtgttgcttctttacggttggtgcggtacccagcgctaaatatcgctacctgaggtaaacacgtcttaccacctaacttctttgctgctggctccgtgaagcacttgcgacgtgcgtcgcgtatcttcgccagctcacaatctttcgcgcccttgtggtgctgctgaatgtgcataagcggtatctttgggttgaagtccaatccgcacaccggacaacgaatttcattcttcatttgccacctctcgtttagagaacttatgactgccgcctacacctgacagcgacagggtataaattcactttctccttaaagaacacttagcggtcgatccctctcggggccgggggtgattacatcgctcaccccgttgcgtgctgcttagttggcgtcctgccgtgttgatggaatagataatagctttggatataatacatgtaaatagccaaagatataataatatagatttagctatttaattattgattgataaaggtatttatttttaaaaataattcaggcgtgaccattcgcaccggctatcaggcgtgaaaagtgtgaagtgagttgtgtttaatacgggtagagtggtgagattgtcagattacaggcacaaaaaacccggcagcggggccgggttattttaatattatcgagaaaagtgttggccctttattgtcagagctcatctgtcaaatttagctccaatgtgccgtttttcttgggcatcacttggtctaccgttttgacaaatcgattccatccatgtccattagatatagccaacctttgtagcataattaacgagtgaaggtgctgagatagcattggattcccaatatctgaagttaaccattggtgtaatttattttttctattacctttatcgtctttgggggattttttttcaagctctgaaagaataccatctcccaatcggtcataaaccaaatctctggtgtagtgtgaaacaacgctatacctgtttttactcatcccttgccatggccaattttttagcttgtaaatattttcgtagaactcatcagggaattttttagcccaagcagcaagttctttacttattattttattaagaaattcttgaagtgcatcccttggtcttacctcttgatacccagtggcctcatcaaccagagatacaataccaacccttgcaaacgccctgataagcatgtctgaatactgagcatatctaaattcctgctctgtggttaacaggttcccatctctggcagcaaggatggcctcgcataactcctgaagaatggtagcttcaaagccatccgcaaaaacattggtgttacttgaaccctttataggaaaggccccaatgaactttattgggttttcgatggccaatattaactctttgtttttgcttgggttaagcattttatgacccgctaaacgggcaaccccttggccacggcctttcatacctattgacgccgttaagcttcttcctgatataacccttcgaccatcatcaagaacaaagcatggaatctttatccctgaaatatcaatctcgcctttatgggtagctttaggcacatttttagccaccgcacccattctagctatttcctttcttctttctgacgaaagggagtcagctctcgctacccctccctttgattgcttgctttccatacactcagcctctcaactttgatgatgagaacaatctttatacaaaaggataattctagcaagcagtttatgtaattgtgcttgctataaacattccggtcgggttggttctattggcggcctaatgctatctatgaactgggatgcctcttttttgactgcgtgaaattccagatcgttaaatgccattattcctccttgagctagcagtaggttagccgtgggttagtaatctatctctgaccaccagaacacgcggccaataatttcaatatcttttagattcttctcttcatctggatattcagacttgttgtaactccgcacgctgacacgaccagggcccacacgataaagcatttttactcgcttccatccatcctcattgatcgcgtacatcttaccgtcaattatctttttatcatcagtgttaatggcgactgtcgcaccatctgatatttttggctccatgctattaccgcgagctgggaagcaaagtattccagatccatcagtgttagcccctattcgacgtagcgttgccttggagaatctgagcataaacccgttgtagtcctcatcagagacgcttccatcgccacatgcaaattcaatatccctaaggaatgggacttcaacctcatcatcgtcaagaggggtatttttatcccacgccttaactccaacccattcactttcaggtgggattgttgagtcaggatggtgtgggtttacaccgctttcgcgcattggctctattccttcactaagccattccggccgaacacctaaaactctggctatttgaacggatttccttgaagagttggcttttcctgaagttagtttccagacgctaggctgtgccatgcctacggcctcagcgagagaaccctgagtaaacccaccttctttcatggctaaatttagccgatctgcaaaagtcattttttccatttacttagtctatagccatggctatacccaatcaaatatctaaagctatttacaatatgaatagctttggctattatctgtgtatctacaaaagcaggagttatttatggtcaacgaagctattaagtcggctattaacatcgtaggaagtcagcagaagttagctgaagcttgtgatgttagacagccttccgtttggtcttggttgcatgggaagaaaaaggtttccgccgaaaatgcgaaacgcattgaaaaggcgaccaaaggactaatccctgcataccgaatcagacctgatttaactgacttgttccctcatccggaaaaagcagcttaacaaccaacagcattaaccgaacgcccggtatatggcggccccgaggatctgccaggtaaggctaaaagtcggaggtgagcgtaactaggctcgccataactaaatcacttaaacaacatggaaatcatacgaaatggatagcgcaagtaacagcaagagaattatggaagttgaatctgagctacgtagccgaatggctatcaaggggcagagcaactttgcacgtgaagctggctgggctgaatcaaaggtcagtcggttaaacgtaagagatatggctgtgacgtttgttcttctggaaaagatatgggagacgagcgtgataagggaaatcgcaaggcaggctgtgattgcggtgaccggaaagcaaaaagccccaacacgaacaaagacttcagaacagcaaatttcaatcagtttctgaggtgataagcggagaaatatatggcccgttcaagaaatattaagccgggatttttcactaacgacgaattagcagaatgcagcccatacgctcgtctgctattcgccggattgtggactatcgcagataaagaagggcggttagatgatcgccccaagaagattaaagcgcttgtattaccgttcgacaatgttgattgcgatgaactactacagcaattgcatcagcacaacttcatcactcgctatttagtggatggaggcgcttacgttcagattaataactggaagaagcaccagaacccccactgcaaagaaagtgctagtgagatacctgaacaagtaatgcaacttattgaaactaaagaagcaccagaagagcacggtgcaagtacggtacaagaaccagagcagaacaatttaaatcctgctgattcccttaacctgattcctgattcccctatcctgattcccttcaacacccaagccgctgacgcgccttgccaaattgatgatgaattaccacctgcaaagcaagaggagttatcgccagagcctcaggaagccgatgttcaccagatggcaagccgctatgcattcgagggttctgttgttcgattgagccagaaagatttcgattgctggaagtctctgttcccgaacattgacctgattgttgagctgacaaggctagatctggagttttcccatgagaagccaaagagctggtttaccactgctagcgccaagcttaactaccagaacaagcaatcaaagccagtggcaacaaaaacgagggctgttgctgataacttttccgcaaaaaattacggaaccaccgacacacccgggtggatggaggggtaaatggacctgtctgaaaaaattagtattctgaaaagcaaaatctcagagctgagtaacccgccgaaagaaataccccatacgacagtcgctatcatgtgggcggagtgcgaccatcatgggctctatgagcagcgacaacgcagtatggccaaccttacaacatctaccaaaagcgaatgcccaaagtgcctagccgagcgacttagcgaacttcaaacaaagcaatcagatcatgaacagtggtccagatcgcgccacgttagtcagttgattgatgggcttaatctgcccgagagatttaaatcggcaactttagaaaactatgaaccggtcaatgatgctgcaggtcattgcttacgagtgtgtcaggcttatgcaaacaagtggccagagcgtttaaagcagggcggcggcatggttatgtgtggcaagcccggcactggaaagaatcacctcgcactggccattgctcaatatgtgattagaactcatgaatcatcagcactatttacaaccgcactacgcatcgctcgggcatttaaatcaacatggagtaaaaatgcagaccgcactgagtctgacgttatcaaagcctacacagatcccgacttgctcatcattgacgaagttggcgttcagtttgggtctgatactgaaaagcaaatcctctttgagatcatcaacactcgctacgagaaaatgcgcccgacaattttaatcagcaaccagacgagagccgagcttagcgatttcatcggtgagcgagtgattgatcggatgaatgatggcggcggttgtacgctggcgtttacgtgggatagctaccggtcgagggctgcatgaatgccttgggccaatacatcaaacatcagatagagcagcaagaacgccacgaatcagacctccgtattaaattcctaagcaagttacctgaaaacaccttccaagccatttataaccagtttattcatgatgagtttgcaggtggcgttacatacaacggaatttactacagcgagtgggaaatctatttcgcatcacatgatcgtgacagtgacgcggaagtgctgctgtaaatcaattcgaggaaatcatgatggcttttgtatccatggctgaaatatcacgcccactctccgaaccaaagttaactgtccgtaacaccggtctttgctcaataaatcgctcggtatctggtgagtttgattctatcgaggctgaaatatgcttcgagacaaaaactttccggttcagagttggtgatgggctatcaaaaaggctgagagacggaacaagtttctcgataccaaaggctgcatatctggaaattttagatggtatcggcgggaaaaaggttatgccattaacaaatggccaagacggttggtggtatgccaaatacgagcaaaaaggggtcgcatgatggacataacaacatcgcgggaagagtttgagaagtggctggaagacattcacggtttgtatggggaagatattgattgggagccagagagaaattgttatcgaatttttggcgttcatctggcttggtgcgcatggaaagaatccagagcaagcattgcggtgacacttccaaaaacttgcagagatattgcgggggaagatgcgcacctagacagcgatgagacatcgtttgattccggcataattttatgcgccgaagccctccgctctgctggtctaacggtaaaaggggattgagatggaaattccaagccgagtaaagagcgctctggatgctatggaggcaatgattcgtacgcacgaatatcattttgaagatggcacattctggtcaccagtggttaagcaacaaatagagggtctgcgtattgccaataaaaccaaagccattatctatcacgatagaatactaagcgggaggaagtgctgatgaaagaactagaccaatttacagtagagcagctaagcaatttcattgaatcagaccatgctcaatgtggcgatgtggcagcactggcaagaatcgcgctatcagcaaagcaggccgagccggtttatcaggagcgtaggtatcaattttccggcaagaaacagattgaatattgggctgacattaacaattcaacgtatgggtacctgccaaaaagtgagcgtcgtttaatttataccactccaccatcaggccctctggaaattcctgatggttggattaactgcaatgataatcttccattagaagatgatttgtgcttggcaattgacgaccaaggtgtgatttggacaatgatttttgaggatgatgactttggtccagacacaggcggagtctgccctaacgaaattacccactggatgccactccccgccgcacccacctcacttctagagggagagagtaatggctaaatctgaaataaccctatccaagaagcaataccgccaactctgcgatgcttacatcaacacagtaaacatgatgcctcagcttctgatgattacaccccttcaagatgacaggtcaccagatgccttgtatgcactacaaacggcattgcagattgttcagcagcaactgaaaggagtcgttgatggaattcatggctgacaatatggggaatataccgctaacgataatagcattagtcattgttgtggtgctgtttgcttgcttatgggagtgactatggataaaaaagtttttgttttatgcggtgatcaatacaagcgaaatgccatccagtttataaatcaactccctgttaatcctgataaaccactcctgatcacaatccaagagcgaacccgcacattagaccagaatgccaagctctgggctactttaggcgatatcgctacacaggttgtatggcacggtcagaagcttagcagtgaggactggaagcacatattcaccgcatcactgaaagggcagaggtcagcaccggggctcgaaggtggctttgtaattctgggccagtcaaccagccgcatgaccgttggagagttgcgcgacctgatagagctaattaacgctttcggggctacgcatggcgttaagttcagcgatgaatcacggcttgctatcgagtgggctaacaggttcggcgataagggaaaggtggcagcatgaataactgggacattggaatcagggctttcatagataagccatactccgcagtcaggcaaggctacaaaccgtcggttctcgattgttgggctatatctgccagtgtcatattcgtagtattcaaaggactattttcacacgcacttgatattaccgatttttttgacatgacaatcagagagattggcgagtggttcatgtatttgtgcttaaaactgatcgtggcatcaacatacccattcacattttgggcatggggtacgcttatatatttcttgctgaggaatgaagcgaaaacgcaccgcaccagaagtgaaaagttatctaacctgatttaacccccaatccccgccagcgaaatacccacatatgaccacatatgcgttttgctgcgcgccaaatttgaccgagtaaggagaacgcgatgactcagttaccgcaatccgtatgcgtgtattgatttgatgcttaacaagggtgaaacctacgctcatcagaaatgcgttgataaggcagcgaaggaggccgggaatgatagccaagctcccgaagcatcgaaattgtaaagtgtgtaaaacgagatttaaaccagtcgcgatatacgagtggtggtgctgcgaagagcacaaaatagaatacgcggttctggttatgaaagagaggcgaaagcagaactacgataacgagattaagcaaaggcaggagcggaaaaaggaggatcggaagcagctaaaagtcagaagaattaatgcccagcccaaaacgtattggattaagcaggcacagcaagccgtcaacgccyttgtaagagcacgtgattcaagcctgccctgcgtatcatgtggtacccatttagcggcacagtgggatgctggacactacagaacaaccgcagcagcacctcaattcagattcgacccccggcaaatccataaacaatgttcagtatgcaatcagcacaagggcgggaatatcgttccgtaccgcgtcgagctgattaagcgcattggaattgagacagtggaggctatcgaaaacaaccacgaacgcagcagttacagcattgaagagctgaaaagcattcgagattactaccggctggaactgaaaaagctaaaacttctccaggaggcagcatgaacgtaactcaattaaagctcaccaaagaacagcatgattggattaatggctggcttgaactgtggggttcatgggtttactcggggagattagagaagcgcatgagcagcgttatagcgcagtacatggctacaatagagccgcagaaatatccagatagaccgatgtgtaatgacgatgacggaatgttgatttctcaggtcgtagattctgtcatgaacattgatacaaaggcctttgggatattactaagctattacgcgaacaattccactgaatacgcaattgcagtttatagccacaagagtgcaattcctcgcaaaatagtaactcgcggcgggaatagattaaaacgcccatcgctatcaacctgtcgccgagaggtgaaggaaattctggatgctagcgtctttatgatttaccaaccgcygctatctgccatgaacagccgcaaacgtgtagggaaaattaggaaggttgcataaaacgtgttgacacatttgagcaaatgagcaatgataagtaggtaaggtgccgtatctgtcttaaacgaacgcctacccaatttaaagccctgactctaaccggtcggggcttcttgcatttgcgtctatggttaagtggcataactactggcttccacccagtaagcgccagttcgattctggctagacgctccacatttcaggctgcgctattgcgtggccttttttatttagctcgccgccagtgccaatcaccctcaaaaacacaacgtgcctgaatgggccacggcggcgagctattccctacacaacagcacccgaccaaatgccggggaagattttccccaaacggggggtgggtcatgaaaatgttgaaatcaccggatgtatggatgctcatcattgcctggatagcagaccaccggggtgagttacttagcgcggcactggctgcgttgatggcttacttgcgtggctggtatgccggaggaggtaaaacgcaacgtatgcttgatgcggccatgtgctcagtgatggcatggtttatcaaagatgtattggttatagccgggctgaaccctgactggtcattaattgccagcgtgttcattgggtacatgggtacggattacattggttcggtgctaaagcgcatcgttggcaataagacaggggctgacaatgcaaatcagtagcaccggaatcaatctaataaaacaattcgaaggctgcaaattgacgacatatccagaccctggcaccggcggcgctccctggacaattggttacggctggactcatccagtagatggtaagcccgtggttcgcggcatgactatcgatcagcctaccgccgaccggttgctgaaatgcggagttgtccagttcgagcagggcgttaaccagatgctcaaaatcggcgtaacccagaatcaattcgacgccttggtatcgctggcctacaacatcggaacccgagcgctcagcacatcgacgctgatgaaaaaggtaaacgcgggtgatgcaaagggcgctgcggatgaattcctgaaatggaataaagcaggtgggaaagaaatgaaaggcctgactaatcgccgggcggctgagcgtgagcttttcctgtcatgagtcgcgtaacggcaatactcatcgctgtaacggtggctctgctattcggcctgatgtattaccacgggcaagtaaccaggctacagcgcgacgtctctgacattacccagatagccaacagcagacagtcagccattgacacgatgctaattcagcgccagcaggttgctgctatcgatatcaaatacaccaaggaactggcagatgccaaatctgagaacgagcgccttcgtgctgatatcgctactggtgctaagcggttgcagctcaacgccagctgtaagcgattgcccgaagccacagccacctccagcagcgttgatgatgccagcgccagacttactaacgccgctgaacgggattatctcagtctccgcgagcgaatcggaattgcaaccagccaaataaacggcttgcaggcgtatatcaataacgtttgtcttgcgaggtaagagaaggtggggacagcatccccgctgaattaatcacccaactttgcggtaagggtagccagcttttttgatatgcgcatcaaaatactgccccttagacggtgcgttcattaatgacgtgtgaatggaggccgggactctcgaatattgataaataccgcctcctagaaaagcaatttccaaagtggaacttgcactatcgtaaccaactgaatgaaggtttgaagatgaaacaggttgacgaatcaattgataaatctcctttaagtggcaaaagtgccaaagagatgatcgaacactttaagaaatataacttcgtggatgatcacggacacaggctagacatgtgcttggacttcacagatttgattgaaatggccgtttcgtaggcttgttaggcaaaaaaacacaaaaggctcgacttaggtcgggctttttttatgcagtaaatccagcgcatcgcagcgcaaatcactcagaacctttcaggatgacccttgaggaaccggctggctgtcggagccttctgagggccgtattcctgtgcgaacaaggttcatcactaaaaggtatatccgaatgaacattatccctcttagctataaaggcgaatcagtacgctttaacactgaaggttgggtaaacgtcactgacgttgctgagaaatttggtaagcgcatcgacaactggatgaggctagctgaaacgcttgaatacatccgggcgctggatgaggcaatgactggtgtggagtctgaaattctacatccctcgaaatgcaggtatgtaaaaaccagtaaggcgagaaaggatcgcggaggtggtacatggcttcatccaaagctatcggtcgcttttgcgcgttggtgcgatgctcggttcgctgtctggtgtgatttgcatatagatagcttgttgcgtggtgagctaacggagcagcaaaactatgaccaggcctgccgaattcgcgatgaccggaaatcaaaagcaagtggtggtgcacgagaaatggcacgttggcgctgggacaaacctgccctagaagcaaccgtggaattctggcaggagcaactgaagttaacgctcgatattgccagctaaaagaaaaactgagagccactttcacaacggctctccattaactaaaagcactcatatatcagataggcgatcccgaccaaagaggccatccctgtaaaggttagccccaatgccagggtggagtagctcactgttgcagccatgtaccaacttttaaatttagcccacatagtcatcatcctttttgttttgcaaaagaatgacagtcaaatcagagggatggaaattggttgtacagatcaataatcggctattgatcgtttaaaacgatcgttgaacaacgagacggagcaaatatggcaagaccggattggggagccattcaaggacagttcctcgccgaccatgccaaatcaaacatctcccctaaagattggtgcgaggcgcaagggcttaattactccactgcaaagcgctacatcaaaattgcgaatgctaatagtaaaagtgcgaatagaagtgcgaattcgcagaaaggaaaagacaccaaaagtaggcagccaaaggaatctggtagaaaccgcgaatcaaacaaagtcaagaattctccaggcgcgaaaccgatacgtggcgctcgatgttcccctccgaccaatccattccaaccaggcaatcagcatgcactaaagcatggcggctatgggcgtcgcatgttgctcactgacgaatcagcgaagatgctaattgcctgacgctagatgatgaattgttttggctacgtgctgccagtctgactgccgctgagaacattggtcgctggcgaactgagttagatgatgacgttgatgatgatactaagaaggcactacgtgacaacatcagcgccgccgagaaggctatgcatcgcaacactgcgcgcattgaatcgttggagtacacgaaaggcacaatcatcaagatgcagatcgatgctgcttaccgtgaagctgccactgaaaaggtggaactggaaatagacaaaatgaaggacggagatagcgataacgcgattgtcgttcataactcgctgccaatccctgggagataatatggccgacatatatctacctacgctacacgatgggcagttaaaggtttggtctgatgcttgggatcaccgccttaacgctatccgctgcgggcggcggtggggtaaaaccttcatgctcgccagcgctgctgttacgtatgctacagcgccatttaagcgccctggaatggatgtcgagttaggtgggcgcgtaggtatatttaccgccgaatatcgccaatatcaggaaatttacgacaagcttgaagaaactcttcagccgctgaaaaaaagctttagccgacaggaaaagcgcctactacttaagaacgctgggaagattgatttctgggttaccaacgataacaagctggctggtcgtgggcgtgagtacgatattgtgcttatcgatgaggctgcattcaccaaatcaccggaaatgctgaaggaaatatggaccaagtctataaagccgacgcttcttactacgaaaggccgtgcatttgtattctccacacctgacggcattgacgacgataattttttctacgccatttgcaacaataagaagcttggcttctttgagcatcacgcaccaacgtcatctaatccatttgttccacctgaagaactggagaaggaacgggagaataatgatccccgcgtattccgtcaggagttcttggctgaatttgttgactggtcatcatctgccctgtttgacataagcaagtggttcattgacgagaagcctgttgagtacccagccatgtgtcaggcggtctttgctgtcatggacacggcagttaagggcggcacagagcatgacggaacagcagtagtttactacgccattgaaactcgccccggcatggagcgactaacaatccttgattgggatgttgtgcaaatcgatggcgctttattagaggtttatctcccctccgtattcgaccgactaaatgaattaaccggccagtgcgtcgctgtaaacggcagccttgggttgttcatagaggacgccagtatgggcagtatcttgctgcaaaaaggcgacagcatgggttggcctgtcaaaaagatagagtcagcactaacaagcaaagggaaagatgagcgcgcaattatggcatccggttatcactaccgggggttagccaagatatcgcgtcatgccttcgagaaaactgctgtctttaaaggcgagacagctaaccatctatttaagcaagtatcccgattccatctcgcagataaaaacgcacataagcgcgctgatgacctgctcgatgactacatgtatgggctgatactggcattcggtagcggcgacgcactctgatgagataacaaaatgattgacgacgaaattgaaatcggcagcagctcaccagaactgtcactacttctggagggtgatgatatccagccaggaatgagcgccggatatcaaatctgtaagactatttacctctaccatccgctgggtgggaaaatggtagatcgcccaattaaaatggcgatgaacgaaccaagaacggtacatgtttcccaaacatttgcgcttgaacaacgcctacgagaagccttcgagcgcgagtggcggtcacttggtgctgaccgacacatttcaaatgctgcacggattgccagaatttacggtacatctgcgatagcgatgttggtagataaccaagagccgtcaatagcccttgatttccgcacgctgtacaagcacaacatcagttttaacattcttgacccgctaaacactgctggcagtattgttctcaaccaagaccctaacgctcaagacttccaaaaagttgatggcattcgagttgcggggaaggcatatcacaagtcccgttgtgtggtgatccagaatgaagcgccaatttacctcgcgtataacccagcagcgttcggtttcacaggtcgaagcgtctatcagcgcgccttgttcccgctaaagtcgtttattcagaccatgcgcaccgatgacatggttgcagtaaaaggcggattgcttgttacgaagattaaagggcctagctctgttgtaaacaacatgatgcagaagcttagtggtgttaagcgaatgatgctgaaacgcggacggaccggggaggtattacaggtcggtcacgaagatgcaatcgaatctattgaccttaacaacctcgacaagccactcgatacagtgagaaatcatattctggctaatatcgccgctgccgccgacatgccagcgatcatcttgaatagtgagacatttactcagggatttggcgagggcacagaggacgctaaagcggtagcagtttacattgatgatctgcgtgaatggcttgatgagttgtacaactatttcatccgcatttgtcagtaccgagcttggagtatcgaattcttccaatccctgcgtgcagacatgccagaaataaagaacacctacagtctgtatttcaccaagtggattaataactttgagtacacatggccctcatcgctgaaggagccagaaagcgagaaagttaaagttgatgaaatcaggtttaaagcaattattagtatgggggaattgctgcttcctcaactaaataaagacaatgaaaacagagcaacatttattgagtggatgcaatcaaacgctaacgcaaatgaacgcctcttccctaaccgacttgaccttgattttgacagcctgaaggataatccaccgattaaagagggggaagacccaaataaccctcaagttgattggaatttagtatgaacaatttcacgcgaattgtgcgagaggcggttaagtatttcctgaagaatggctactcatcaagcagtgagctggagcgctggcagtctcttattagaggggccgctgagggtgctactgctgatgattatgccggtatggtagccgaaagattaaggcattcattcgagcgccaagtaaccaacggtggtgctattaatcgtcatccaggaatagcgcgctttaccattcaccatcttgaaccacagcttagggcgcagttagatcgccgaattctcgccagtgttgacctcatcaaactgaacagaagcaaagctatcgacactacgttatctcggtttagcgggtgggccagcagtatccctccatctgcaagtatcgctctggtcggtaatcagggtggcatgctgaaaactgcacagcacatccaaaaaacagccgagcaaatggactatgaagcccggcgcgtgatgattgatcagaatcacaagctgattgccaacatcgacaatgttattgcaaccaacaacaacgctatcgctgttgagtggcacagccattggcgtcgccctggctataactatcgggttgaccacaaagagcgagataaagagttctatcttattcgcggtaattgggcgcaaaagaatggctatgtaaagcccggtaaagcgggatatctggatgaagttgaccagttcggagaaaagcctttctgctcatgttatggcgagtacatctacaacctccgcagcatccctgaagacatgcttacccagaagggtaaaaagtttatggagtcgatgggcggaaaataactaaccacccatgacgcgagaggttcaatgacccgtggctattttcgctagtggaatcctatttcgccaaggtaagcgagttttacttattcagcgctcagatgatgggacatggtgtccaccgggagggaagcttgaagaaggtgaaatagcatccgacgctgccagacgagaagtgatggaagaagttggctatcagtatacagggccaatgaccccctacagcagcaataacgattacctaacctatcgagctgacattgaagaacagttcgaaccacaaattgacgatgagtcactagccgctggctggttcgatatcgacgatatgccaaagccattgcataaaccatttgccgaaatgatggctcaacagccactcaatgaaacgcaagtggctgcgctaatagctgatggcaccctaagcagtccgcaattcttcatcaacatgtggatgtacgccattcgtgtaaccgggactggggtcacgtggcgtagtgctgacaaccaaatggcgttccgagacccggaaaactatttaacccccgattttcttcagcgtgtagccggtgtcccgttgatttggttgcaccctgagaaaaataagctcgatagcgatgaatttgcaaagcgggttattggaaccttaacgaatagttgggttgctgataatggggaggtgtgggcgatagcccgtgtttatgatgcagaggctgccgaaataatggcaacaaagcaattaagcacctcaccaaccgtcacgtttagtgaaccgcagaatgcagttatcaaagtcgacggtcagtctctattggtggaagactccccggtattgctcgaccatgttgcaatttgtgaacagggcgtatgggacaagctccttgaccctactggtgttaaatctgattccattccaaacgaggctgaaataatggacgaagacaaattcgtagaactattcaataagtgcatggattctcgcatggcgaaagccgactcagaggctaaagaaaaagccgatgctgaagagaatgcaaagaaagaaaaggctgatgctgaagcaaaagaggctgaagaggccaaggctaaagcagatgcagaagaaaaatccgcaaaagaaaaagctgacgagaccgagttgaaaaaacttgagaacgaagcaaaaggtgaagatgaccacctggagaaagagcgcaaagagcgtgagaaagcagactcagatttgcgcagtgaaatggcacttctaaaatctcgccttcctaccgagctatctgactcagaacgaaatgaattagctgatgcgcaagttaaggctgatagcgtgttctctgtgctgggtaagcgcgcacctatgccgctctctggtgagaaaccactgtcatatcgtcgtcgcctgatgatccagttacaggaacattcaagcgattacaaagcagttgatctctcttcaatcgctgactctgcattgttgaatatcgcagagaaacaaatttacgccgatgcacaatcctcagccagtttgagtgttgggcctggcatgttgcgtgaaattaaacgctccgatgttactggtcgtcagattagtaccttcgaaggcgatccggcagccacttggggaccattccaaatgggtaagcgtcaggtcaccatgttcaacaaccaggcttaacgggagcattaaagcatggctaatttatctctaaacccaatggcgacgactaacgcattgggttctttcggtgttcagtctgacggcttcattcaaggcgttgctttggatgacccggctaatcgtttcaatcttgcttccggcaccgtttctgcaactgagactaaacctctgtggggcggcgtgccggttgctgagctgatccctggcgtatcttccagccctcgcggttcgaccattcgtcgtgcgctaggcgtggctgatattgaagggtttacagttttcaatcaggcgcataatgggctgaccactccacaatcacctgttccactatttgcgtcaggcatgagtgtttccttctatcgctttggcgcgaacatgcgtatcccattgaaagcatcttctgcggtgatcgcgctcggtgccaacaatgcatctgtaaaaacagcattggcgtgggacttcgttaacaaccaaatcaccacagctgccgatgcgggttatgcaggtgctgatattgccaccaccgccatttcattcaccggtggtgtggctacggctactactggcgcggcgcatggattaactgctggtaagtacatcaccattagtggtgctgttcctgcggcttataacggcactgtagttgttacctcagcaccgacagctaccacgttcacttatgtgccagcgtcaacacctggtggcgcagcaactacacagggaactattggcgcggtaactctggcgaacattacgctgccggccaaagttatctcaatacagtctggcaactcaaaaaccgtctcttatgacagtgttacgggtttcctgacatggaatgatcacgacagctgcgcgctggtcctaatttaatcgggagttgaattaaatggctgcaattactccgagttacacgatcgtcaatccgtcgtacatcgcgccggaaatgatcattggctaccagcaggcgtcaggtgcatttgaaaccatcgccagcggtaacccacaggttcgcctgggtgttggcgatcagtatgtttacatgcgtcgtcttgatatccgcacccaggttacttccagtcaatccgggaacgctaaccagttgccgagtgttgcaatggaagcccgcatgatttccactccaacatatcttttccgttgccgtggtatctatgaccaccatgacatggcagcagcaggaaactggaatgtggcactgcctgaagcacagcgccttggtatgcgacagggtatcttccagcaacttcgtaccagcttactgtttggtatgaacccagcaggcggtgagggcttgctgaataccgcaggcgcgaccactgacactctgccagctgactcaagcggaaacaccacggtcctgacttacgaccatggggaaatggcggtttatcttctggggcaagttcaggcagcgcttacacgaaccatgcaattgggtcgccagcagcgcgttgtaattcttggtcctcagcgtgtgctgggtgccatggagattcagcagattgttcaattgacatcatatcagcgccctggtggtggtactgatgcagttggcgggatggtgaaggaagttctgagaggtgccggagttcaggttgattgggtttacgacgatacattgatcggcgctggcgctggcggtacagacgttgtgttaattactatccctgaagttgaagttccgatggttaactcaaccattaacaccaacgaatttgccaaactttcaccttctctggctgcaaatgccctgatgttctgtgacatggctgcacctcgcgaaattcctactccgatcgccggtggcgcagtagacgtgttagcagaaatgcgttcaacatctggctgggccgttcgtccggaagctatcactatcttatctatggcctacagcgcttaagtctgcgcgttgtcataagaacccctgctggttaaatccttcaggggttttttattttgggggaaacgatgaagctttatatcgcaaacactactaagcagcgccacatgttctctttccgtaccttagagacgggtcgcttgcgcaacattcctattgcttatggctctcaagccattgttcttgatggtggcgctgaagaaatcgatgcagttatccagcatcaccaagtttacgggctgatagatgcttcaactattgaccaaagtaaaaactttgttggcctttgctacagcattgataagccggtgcaagagaagatcatcgaaaaagcgatgagagataacgaccataagttgactgaaacctctcataaccgccgtcaagcgtcagtcgcagctcaagacgatgcattgctgaatagcggtaccggttatggcggtgacatggagttcactgtcgagcagacaaagggccgtgatgacaataacgacacgcctagcgtgaatgaaacaattgtcacccagaagcgcgggagtaaaaagtaaatgaccatcagtctgtcgggatttatcgagtttattcgcactgacatggagattaccgctactcaggttcccgacgactcgccttcaattgctcttgcttacggtggcgctgttgagtgggtgaatcaggatattgcctctgtgatgccgaatctctatacggtggcggtatataaccttgctgcttcattcctggttaactacgggacggaatcagtattttctgagcttcgtaaaacgcttgggctgaataacttcaaggctggggtgatcaccggagccagcgataactcaacaagttctcagcgcctggtgcctgatttcttcaaggacttgtcattagctgaccttcagatgctacttgacccttgggggcgcaggtacctgatgattgctcagcaattcgggagtttgtgggggctatcatgatcactctccatctcggtgttatggacatcccttatggtgatgagaacacaaccactggcgacgtagcagagctgctagagggtaagtacaaaatcatgcagacgttctttgaccggtacggtaaagatatcgctgacatgatggctaatgatattgctgccagtcttgagaatatgattgtaggtgcgccacctacaagagatccgttagctgaatcaatgtcacgaacgcacaacctatttgtcgcgtttttggataatgaagagatgaatgggttagcgggaattccaactcgcagggcaatggaagggatatcgaagagattcaaaaataagaagggtagcccaagaccatcctttatcgataccggaacatatcaggcgtctatgcgcgcctgggtaagcggggtgctgaatgccttccctagctgagctacagaaaactgcacaaacagaacttaatgcggccttgactcagggcctcgatgacataagcctttccgaggtcgtcacatttacaaaatatatcaggaaggttctccctctggatggctttgtgttctgggtaaaagcgtcaattctcactgacgaaccagatcctgagccagatacggtggatgtgaaaggttacctgcacttaacaactgaaaccatccaagatgatgagcaactttacgaccgaaacgtagtgacattcaccgctcagtcggatatcgaccaatttaatgacatcggttctgatgtgctctacatcggtgagttttacggaatacagttctcgttctctcggcgaaccggcctgaatgaaccagctaatctatatcactacactggcgaagctgtatatccgcatatgcgatcgcagattatcaactctgctgaagatatagatttaactgatgtggttgtctctagctccctgccgatctggttggggttgaatcagtacatgccaatgtatccagccatgttatcaatccagaatctttcgccaccatttgcgacagtcaggtgtagtaacgccgctcctattgccggggcgttctatctggatgagaagtacaaccaataccagcttgtttcggaagatgtgaccatttcagtaaccggattgcgtaatgccgcaatagaggactttctttgctacatgcagcaatacacgataagtgatgacgctgaaatgggaattatgaacattcctgtcgttcaagatgagcgcgtgacgcagaacgaacttaacgttactgccatgcgtaaaaccatcaaattcaagatcaactattaccagcaacggatgaggaatgtcgcccgtaagttggttatttctgtaatcccgtccatttatccggagaaataattaaatggcaattgttaatattaacgtatcggtgaccaatccaccgaagccgtcgcaactgcttaagtccggggcgatgatttccatgggcgggaccacgctgaatccaggcgagtaccagttactgacatctaaatcagatttgacaaccatcctaaaaccagcaaaagcgattgctaccattgaatgggctacaaacgtagtgacagtaacgctttcggccgctcatggatggacaattggcgatcaggttcctgtattagtttcaggcgttacccctactggatataacggtgcatttactgccacggtaaccacatcaactgcgttcacctatccattatcagttagccctggcgtatccacggttatgggatcggtaaaaactgtagtagcgaatgaaattacccagatgaatacttcatattgggcgcagggaactaaccgagcagtatttgtgctcgagcttggtgatgtatccatggtgaatggtgttgcggctctatcgacatttattgatgaagatatttcactggggaatacataccagaaattcttctcttatctggttccgcgcgagtgggatgagcagacaacatttaaaaccctaactgggcaatatacatcgccaagttcgttggtttatttctttgttactaccactattggcacttattccgagtgggttactacgaagaataagacagtatttgcaggtgttgaggccccaaatattccggcaacggagttttctatggctggcccattccaatcttcactatcgaatgaccccggttcatcaaacatggtcccgccgatggcatatcggttcatgtatggggtaacagaatatccagtgagtggtaatggcacactgctgaaaacccttcaagataacagcattaactacatcggcactgcggcagaaggtgggcttagcaataagatgctggttgctggccatatgctggacagtaatccattcaactattggtattcagttgcatggacggcgataaaccttgaactggatcttgctaacgaagtcattaacggctctaacacctcaaccaaccctctttactatgagcaagttggtatcgaccgtctccaaaatcgcgcgttgaaaacactacgcaatggcattagttatgggttaatcctggggcgagtcattggaaccaagcttattcaaactgactttaatgctgaatatgaaaaaggcagctatgcgggcaatgctgtgattaatgccgtgccattcagtaattacacaagcctgaatccttccgattatcagggcggtaaatataacgggctaagcgctgttatgacacctcgtcgtggattcgagtcaatcacgtttaacctgaacgtaaccaattttgtaggggcataaaaaaatggcaaacccgttagtatcacagggatttcttaaccgtgttcgtggcgcggtttccgtaactggcgatccgtctctgaatgttacagcatcatttcttggcaaagagggggttagtttgcgtcctgatgggccagcaaccgacatcttacccacgatgactggcacggtaggcagccaggcaccataccagcaggttacgttaacagttcacttacttaaaactcagtcgcttgctgctgcatatcaaaatcgctttgcgaccgatacgtcactcggggaaattgtagttaccccggatgctaatacctttgggaattacaccgttcttaatagttatttagttaacttcaatgaaataactatgaacggcatggatcctggctatgtggctacaatttctggctacatcattaccaacgataatatgtgggtgtaatccgtgaaaattgacaaaaatcttaacctggttagcaccatcatccgagatgggggtaatcctgtttatattcatgttaccccgttcccttatgaggttatcgaagagaactgtttgctgttggggaacatgttttcaaactttatttctcaagttggtgggctcggttccgctcgcattgccgccatgatgctacggaaaaaactcaagcaggagcaagagttgagtggatcttctggacctacaattgttgacgatattcaacgcttaaccactgtcatttataacgacaacggcgagtggaagtcatcaccttttgatgccgcgatgaagaataacgttatcaccgcagatgaatatcgagacactgaaggtgaaatagttttttttatggtgtcatctgccattcagaagaaggaactgatagccccaacagtgggggcggtgatcagtatgtacggtgggcaactaacatcatccaacgctatggaattccgcgcttccttgctgaagtcgaatcaggctaccgatacccaaccccagagtgccgagcaggaaacttcatttataccctcttagattgggctgcgaatgaggggttctggcgtgttatccgggaaatcactggggaagaattcttcagtcctgctcaatatcgccagcgcttcttaatcgcggcactcaaagaaaggggctttttcaatggcagctaagtcaatcattgatattgatgtaaatgacgataagttccagtcatttatggagaagttcaacgagtatcaagctgcccttggtgacctcccagaagcatggagaggtgtcgctcatggcattggtgatacagagaaagaaactgcgaaggtgcgatcagagttgcagggtgtagcaaaatcattctccgatggcgctgctgctattctgtcgataaatagcggacttgaccggttaaacgatagccttgataaagccaataaaaaccaatctggatttaacaagaatgcgagtgctgcaaagaaattcctgagtggtgctacgaaagatgcgaaatcgctggccggtcatatcaaggatgcaaccacaagtttaatttcatggactagcatccttggtttgttttctgggctgatcggcgctggcgggctattcgggattaatcgactggcctccggtgccgcatcacagagatttacaacacttgggttaggaaccacgtctggtggccttgactctaccgctatcaactatcagagagcactaagtaacccaacaggtacccttggtgctattcgagactcacagcttgacctgagcaagcgctggcagttccaggcgatgggtatcaacaatccagatcaggaccctgcaaaactgcttccacagatgatccgcaatgcgcgcgatatctttgttaaaaatggcagcaatcttcaaggggccgaggcccacggactgacaaactttttcaccctcgatgatctgaaccgctttaaaaatatgagcgatgcagaaattgattcgatggaaaaaagggccgctcaggacagcaaacaactacaactaagcgatcagattcaaaagcagtggactgattttaatgtccagttgcaacgtagtggttacagcatagaaaactcatttattcgtggtcttgcccctttggctccacagttaaccaggttgtctgattctgtttccgggatgattgattcatttcttaaatcaccagaactggggaaatggattgatggactctcacaaggaatccagaagtttggagaatacctagcatcaccatcatttcgaactgatatcgatagcttcatgaagtcaatccgagatatgggtctgactgtcgataatgtgattcgttttttaaatgggacaacactgaacggatggaatgattcagtagctgatagcgctaactcatcggctaagtgggttaaagagaaaactggttttgatccgcaaactgttggaccggcaattaaagatttattcagcattgggtctaaaaaaataaaagattggtattccggcggaagcattactccagttgacccaactcctgccgatgtcaccgccaagggccgaacaatagccgatcgctttaacaaccccggtaatttgcgctgggctgaaggttacgggactcataacactcaaagtggaaagtttgctgtatttccaacccttgatgagggggttctggcagccacgaagcagcttcagatatatggctctaaagggataaataacgttaaggatatcgttagcaaatgggccccatccaatgaaaacgatacagccgcttatattcgccatgttgttaaatcgacaaagttcagtgaaaacgaaaagctaaaccttaatgatccagccgttctggcaaaactaatttcagctatggcaacgaaagagggggccggaagcagggttactgagggggccgtcatccagatttataacaataccggtggcaatgccattgtaaatagcgctcagcttggagggtatggataatggctttcacgcgggagctttacaagcttggttttgaaatatcccctgtaattctgtgtgagggtgtagctcaaagcatcccaggagggatgctgccgatagtggctcttacacaaagcgcaagttttgttacgggactcatcggcggggctataaacctgacagacttggataagtatttctgccattggaagcccattcagggggcaactatggttgattacgatattgcccgatacccattcgctaaccaaacagtggctgcaaacgcgctattagcacaaccactccgagtatctctaatgatggatgcgccggttaatgagaacactggcgcaatgacaaaattagtgaccctaagtgcacttcagtcagttctgcaagctcatgccaaccttggtggcacattcattgttgcaacacctgcattgatatacagcggttgcatactgaaaacagtgaaagacgttaccagctataacgaagcgatcacgcaaaaatcgtgggtatgggatttcgagcagccacttgttactgagactggagccgagcaagccgttaatagctttatcggcaagatagacggtggagcaaagacaaccagtagcgcgtggacaagtacggctgcggcattaggaaatacctctcttggtggaagcgtctcaggcatagcaagtgaggttgtagggcttgttggaaaactgagtggagctttcggcttatgagtacagaatattatgatttttctggcaatgagcgggagagcatgtcgtttactccgtcgctggatgggacgatttataactgccaaataaaatggaatatatcggctcagagatggtatctgaacattacggataactcaggtaaccagatccttaccaccgcaatgatcgaatcaacaaccggtatggggattaaccttatatcgggagttttttcttcaacatccatgatatggcgtcagcctaatggtcgaattgaggtaacaagctgatgcgcttttacgatattcaaatatatgaccagaagggagctttatttcgtcagtattcaagccttaagaatggagttttcaatcctggcgggctgatggttgaatttgacattcaacgatttggagagtcaaccccacaagggcaaagctgcatcactgtttggggagttagcccacaggaaatgcagcaagcccagcaaaacatgtttggcatgactgtaaaaatgtttgttggaatgtcaaagggattgccgttatcgaagccatctcaaaaaggcttggttcttgaggggaccatctggcaagcatttggaaactggcagggaaccgagttacggcttgatttaatcgttgttgctggacccacatcgaccaccagtcagttacctatggctccgcttaatttaacgatgccatggggggtgggacagcagttatcggtagctttaactcaatgctttcagactcttggtggttcatacactcacaatataaacgttagtaaccgcttggtgcttccatattcaaggcccatgttctgtggggctcttagccagttagctagcgatctgaaaaacttctcaaagacaataattaaagattcatcttattctggtgttgaaattaccatcgttaatggaaaagagataagggtatgggataacgattatattaatcattcagataaaacatcattaaaaagtgccacctaccggaatggtcatccaactcaaatagaattcactgatcttataggtcagcccacctggattagatttggcacaataacagtgccatgtgtaatgcgagccgatattcaggttggtgaccatattttaatgccgaaaaaatcacgggcaatgattcaagcatcttcattttctcaattcagaaatgactctgcttttactggtgagtttatcgtgcaatccgttcgccttgtaggtaacagccggcaacccgatgcaaatagttgggtgaccatcattgaggcatatccttctacggagttggcgaaaaaatgaatgttagcaataagttgaattttaatagaaatattactcagtttgctgaaaacaaaataagcgaagcaatggagtcggctggtaaggtattgccagtaactgttatttctcagtcagggaaaatggtaactgtttcattcaatctcactaatatcccgtacacgctacctcaagtcactattcctatctttgggcctcaatatattcgctacccaatgcaatcaggggataaagggatcgtgatccctgctgacacctatcttggcggagtgagtgggcaagggggagggacggcagaccttacgcctcctgcgaacttaagtgccttggtttttttacccatcagcaataccgagtgggattcggttgatgggcaggtcctgacgctatacggaccagagggggtgactattcgggatggcggaagcaatacaacatttttgcttacgccggaaagtatcactattgccacgcctacacagtttaaagtcacagttggcagtacggtgctaactttgacaaacggcatgtggagcctttctggagaagctggaaagttagaagatgctaccgcaagtacaagtcctgcaattatgcatgagggctgggccggattggttgcatggtgtaatagccacgttcataccaacggtaatggcgggtcaaataccggttcaactacaacgccttttaacgggaatattactgaatgagaacttacggcagaaattcagagggccaatgggtgcttgttgaaactgatgataatggttttaatgattctgtttatctgacgacgcttattcaaaacctgaagctggccccgcaagaatcacccttttacgcgaataacggcatcccggctaatggctcggtcattcagcagatattgccgacttattacgtcaatagaatacagcaacaatttagccaatatttctcttctttgcagattgccatggtcagtgatgacccgccaatttataacatatcggctataacgaacgccggttcaaaaatcattgcacaggtgaatgtatgagtgatttgccagttagttacaatgcatcaggccctatcccactaaccgcaaatgaattaagagataaaatagtctccctcgccactgcgcaatcacctggaattacaactgatttgcccggatctttggtagaggatattgttagtaccagcgttggcgcacttctcgtttgtgatcaagccagagttgatttaattaactcagttggaccactaacggctaatatttttatgcttaatactctcgctgaacaatatgggataactgggcaaaaaacagaggggctgacaactgttcagattatttttagtggcccggcaggatttgccctccctcagggttttttggtttcagatggcacgcatcaatattcattatctgatacaaccataattcctgcgtcaggaacaacatcaccagttacttgtgcggcaacaatcacagggacatgggcagtaccagagaataccgtaaacaatatagccacaagcctgccatcagatatcgttattacttgtacaaatcaaaccgcagggatacccggtggaccaaccgaaaccgttgcagagttcagggggcgagtatgggaatcaggaatgagcacagtccaggggtatcctggctttattcgtcaaaaattaactgatttagataatgttcaggctaggcttgtctctgtcgtggccgatggtagcgattggataatcatgtgcggcgggggtgacattttttcaatggcaggggctatttacaagtcagcaggcgatattagccgattaaaaggcacttcactaaatgttacaggaataaccaatgcttctcctggagttattaccaccgatataactcatggatttagtagtgggcaggtcgctattattaatggagttacggggatttcagggatcaatggcacgcctttcaccattactgttataaattcccactcgttctctattggtgttagcacgacgggttccggggcatggactggcggcggggtggtaactccaaatttaagaaataacactgtaacaataaatgactggcctgatagctacgttataccttttgttcaacctttacagcagcgcgtaactgtaaaattagagtgggcaactgaaagtgtcaattatctaactgacgccacggtatcttccctagtggctgctccagtcatttcttatattaacggtatttatgctggtaatccgttaaatattaatagtataaaagatgtttttttgcagtccataaatgaaactctaaatatgagcttgattagcaatctcaatgtgattgttactgtaaatggcgttattactagcgtggatgaaaatacaaatataattagcggtgacagatacagctattggtttatttcagatgatggcgtgaccgttactggggggtgagatgcttgatgatattattcgtgcatatttatatcaacagtataatgatgatgaaaatcttcaggcttttgttgacgcatataacacgctgtcaaaagacatatattcatggatgaaagatgcgaatctccctgtttttgttggcggctataacgcaggcgatcagctcaggtggattgctttgggggtgtatggggttaggccacctatactggttagtgacaagcgccgcacgtttggtgattacaattcgcttttgtttaaccaattgccttttaatggacggatggttaaggatgaatctgagcaagtagttgcttcagacgatgtgttcaaaagagtaatgacatggaattactataaaggtgatggtttcaactttaccataccgtggctaaagcgccgggttatgaggtttttgaccggggtcgatggagtagatgttgttaatgatcagcggtggagtatttcggtgctgttttccacatcaggcgctaacatttcgattgttaaagggtatagaaagcttacaaactcgggggtatataattcattccccataaatactcgctcttttaatcagaacacaagcgtcctgattaaaagtaacgaatatgagtttgcatcactattcaagcaggctttcgatagtggacttttacatatgccattttatcagcctgtttctgtgaccattgttggttgaatggtatagaatttatcctctttcatagggttttagggatgatgatgaataagttatgttttttgttaattgtgtcaatttttctttcaggctgcgccgaaccacctctatcacagaagcgtgattttcttatcaaaatggctccttcaatttacaacccaatgggggcgagtattcctgtaaatattaatacagtccgaggagaaatgattgccaatggttgggagactgatgacttcttaaagagattatctgataaatgctatgatctttcatatgcagcttcaggttcatgcgcccttgatttttattacgatgagctaaaagaaaaaaaagaagaaaaagaagatggactgtgtagtaaaaacccagtttgcatcagagatagagagactaaatcggcaatacatgatttaaatcatatatattatcttgtcatggcaagaaaccaatatgaccaagctgaatttgatttgaatattagagcattatgcaaagccgctggcgttggacaaagggggggaattccattaaggcagattgaagaagatgtaaaccagcaacctggattgtctcctgaggtaagagggcagttcagggacattgctatgtcttgctggactctaagcaaaaacggtattacggatggaacaacacaaattaagaatgtgtattaataaatggcccaatttacgtaggccttttctttctggcgcgtcattgcgctgagcagcccactcaggtgggctttttattatgtttttcttcaataatttcagagaccttttttagtgactctgcaaacattgacgccatgtttttaagattactgccttgctgatcaagcatctcactctgcattctgatcacattccttagctccctagcatctcctgccgggaagcctgatttctccgcttcgattgcatcatcaagtatttgtactatctcggcgttcagtgatctgccgtttctttttgctctttcagtaagctcgcacttaagttcttgtgtcatgcgcaagttgaactgtggatcgtttctggccatgcatcctccgataaatagagttgacatactattacggtggtattatcttatcaataagaccacggtggtcttaagaaggaagctaaaatgaaagacgcacgtaagttgcctgtatttaatatacgaatgccaaaaagcgatatggatcttgtgaaaatggcggcagaaagaaatggacgctccattaactcagagatttatcagagattgatgaatagcctgaaaagcgagggatttgctagtgtgcagtgaaaacaacgaaacccggcagtgcgtcaacactagccgggcttctaatttgtcaaatactttcggagttatcgacatgtcaagtatagcaactcagatctctactatcaacgttcctttccatggtcaatctttggctacaattttccatgatggtcagccttttgtcgctatgcgcccaatcattgagaacattgggatagattggaccgggcagcttgtaaagctcaaaaatcagaaggaaaaatttgggtgtagagatatctctactcctacaaaaggtggcattcagaagatgatctgcattccattgcgcaagctcaacggctggttgttcagtatcaaccctgaaaaggttcgtgccgatatcaaagacaagctcattcagtatcaggaagagtgtttcagcgttctatatgaatattggtctaagggtgaggtaaagccgaaagtcagcaaaactacagtcaatgagcgcactccgcttcgtgacgcagtaaacatgttggtcggcaagaaaggactccgctatgacgatgcatacaatatggttcatcagcgttttaacattgatagcattgacgagcttgagcttaatcaaattccgctggctgtagaatatatccatcgtgtggttcttgatggtgaataccttggcaaacaggaagcggtgccagccactgttaagcaagtacagttcactaatgatgaactgtgcgcattatcttggttgtggcttgttgctgataaaatgcgtcgacacgcggaagaaacgtacccagcacttaaacagcttgaatcgaaatacgctggcgatgcctgcgatattgctcgtgagttcaaatattggctagggaataccgaatcaattctttccagagaaactcggcatattgctaaaccatctggacgcgagggttgctactcgtctttagcttacttgagagagaatcactggaacccactacctcgttaaaaacccagattgttgaactaaacctaacccgcttatgcgggttttttattatcttaatatcaggagagccaaatggccttgacactcttaacatccaataacgcatcgacagtattggcgtccggcatcagcgcgaccgcaacgacacttactgttaataccggcaccgggataatctttccgtcacctagcccggggtctagttacttcaagcttactttagttgatgccgctacagggacattaacagaaatagttcatgttacctctcgttcgggagatgtcatgacgatagttcgcgctcaggagggtaccccagcaaggttgtggtctgctaatgacattgcagccaatatgttgacggcaggcacaattgcgcaactggctcaaaaagatttatcactacaaacagccaataacttatctgaaatagcaactgctggtcccgcagctgtggctgctgctgtagctaaccttggcttaacagaggccgctgccgccgctgctgatgctctgaagaaaagcgccaacctttctgacttggcgagcaagccagcatcaaggaccaatcttggtcttggcaactcatccacaagggatgtggcgcttgtatccgactatccgatcggcacagcagacaaggttgttactcttccagggctggtatcctatgcgctagctcaatcaaaaaacttgtcggatgtgactaacgcggctaccgctaggaataacttaggcctcggaaattcttcaacattagatgtggggagtgcggctaataccgtggccgccggcaatgacacgcgcattactggagcccttcaaaagacgcaaaatctgaatgacctttcggacaaaccccagtccagggttaacttaggattgggtaattcatccacacgtgacgtagcaacctcggcagaaatccccgtcggtacggcagataaggttctcacgttgccggggctaatgattctttttggaaaaataaacttcactggtaatagtttcatcaggataccagaccgtccgggcgggttaattatccagtggggcaaggcaacaggcctagctactggaacatcattctccacggtcacctttccaactgcattccccaattataccggttcagtcattaccactcgaaattatagtgctgccgccactggtgctcaggcaaaccaaaccgtgaggaacgtcaccagcacaacatttgaggttaatgcggctgatactgtggttgtggatttattctgggttgcttttggctactaaataacgaggttgtgatgtcatatttatttaataaaaagacaagccggtttttggcaaaaaatatggtcgatgatggtagctacggtgaaattaaagactcagacttaatcatccccactgacgatgagatgactatatatcacgccactgccgcaccacaaagaaaactattggggacggtaaagggcaggccagcctgggtcgatgcaccagagatgacgccagaggaagttctagttgaggcaactagtcagagatcggcgctaaaggccaaagctgatagtgaaattgaatggcgtcaggatgcggttgacagcggttcgcctgaagggacggaagcaaatgatttggcaaaatggaaggagtatcgaatctctttaatgagattggatatatcgactggtaaaagcatagagtggccagcaatgccggattagaattttttattggcagggacgccgaggtgggagtgtgacagatttgtgccaaaacaatgacacaaaatggcgcaaatcagcaaagcacgacaaacaccacttaagctggctggcttgtgtagcggcttagacagttgctatcatgcgttccttttaatcacgcgtcagactgtttatctgatgctggaggttctgtgaagtacgaattacaaaaaaccgatgggcgtgctcgtcgtggccgtttggtctttgagcgcggcgtagtggaaaccccggcttttatgcccgtgggcacctacggcaccgttaaaggcatgacgccggaagaagtgaaagaaaccggcgcgcaaatcctgctgggcaatactttccacctgtggctgcgtcctgggcaggaaatcatgaagctgcacggcgatttgcatgattttatgcaatggcacgggccgattctgaccgactccggcggtttccaggtattcagcctaggcgcaatgcggaaaatcaaagaggagggggtgcatttcaaaaacccgatcaacggcgattccgtgttccttagcccagaaaaatcgatggaaattcaatacgatttaggttcagacatcgtcatgatttttgacgaatgtacgccttatccagccgattgggattatgccaagcgttcaatggaaatgtcattgcgttgggcagcccgcagtcgtcaacgctttgatgagctgaataataaaaatgccttatttggtattattcagggcggcgtttacgaagatttacgtgatgtatcggtaaaaggactggtagatatcggctttgatggttacgctgtgggcggcctggcggtaggtgagccaaaagaagatatgcaccggattcttgagcacgtttgcccacagattccagcggataaaccacgctatttaatgggcgtcggcaagccggaagatttggttgaaggtgtacgccgcggtattgatatgtttgactgcgtgatgccaacgcgaaatgcccgtaacggacatctgtttgttaccgatggcgtggtgaaaatccgtaacgccaagcataaagatgatacgtcgaccctggatgctgaatgtgattgctacacttgtcgcaattatagtcgcgcctacttgcatcatctggatcgttgcaacgaaatactgggtgccagactcaataccattcataatctgcgttattatcaacgcttgatggcgggtttacgtcaggctattgaagacggtaaattagagagcttcgttgaagatttctatggtcggatcgggaaacctgttccaccattaaacgtttgatttagaaattattaacttgtaattatagattgaacggttaggattttgcggttactaattttaacacactgatgtcacactactgatattgataacaatgagggaattttaatgagtcttttcatttctgatgctgtcgcatctgcaggggctccggctcaaggaagcccgtactccctggtaattatgctggtggtctttggtctgatcttctacttcatgatcctgcgcccacagcaaaaacgttctaaagaacataaaaagctgatggactctatcggtaagggtgacgaagttttgaccactggcggtttgatcggtcgtgttactaaagttgcggaaactggctatatcgttatcgcactgaatgacaccactgaagtaatgatcaagcgtgacttcgtggctgccgttttgccgaaaggtacaatgaaggctctgtaattttcgattttccctaagggaactaccgtgttgaaccgttatcctttgtggaagtacgtcatgctgatcgtcgtgattctcgtcggtctgttgtatgcgcttcccaacctttatggtgaggatccggctgttcaaatcactggcgcgcgaggtatcgccgccagtgaaacaacgctggaccaagtccgtactgtcttggaaaaagacaacatagcgagcaagtctattgccctggaaaacggtgcaattctggctcgctttaaagatcctgatgttcagctgcgtgcccgtgaggcattaatgacagcgctgggcgacaaatacgtgattgcgctgaacctggcaccggcaacaccgagctggctggccagactgggcgctgagccgatgaagctgggccttgacctgcgtggcggtgtgcacttcctgatggaggtggatatggacacggcgttaggcaagctgcaagagcagacaatggataccctgcgcagcgatttgcgtgaaaaaggtattccttacgctgcggtgcgtaaactcgataattacggcgttgaagtgcgttttcgcgatgacaaagcccgcgatgaagccattagctatctttcttcccgtcaccgtgatttagtcatcaactctaacggcagcaatacattaaaagccgtgatgagtgacgatcgcctgcgtgaagctcgggaatatgctgttcagcaaaacattacgattctgcgtaaccgtgttaaccaattaggtgtggctgagccattggttcagcgtcagggtgccgatcgtattgtggttgaattgccggggattcaggatactgcccgtgccaaagagattcttggtgccacggcaacgctggaattccgtttggttaataccaacgttgatggttctgttgccgcctctggccgtgtgccgggcgattcagaagtgaaaaatacccgtgaaggacgcccggttgtattgtacaagcgcgttatcctgaccggcgaccatatcactgactctacttccagtaccgacgaatacaatcaggctcaggtgaatatttcacttgatagcgccggtggctctaccatgtccaatttcaccaaagacaacatcggcaagccgatggcaactttgtttgtggaatataaagacagcggtaagaaagatgccaacggtcgcgccattctggttaaacaagaagaagttatcaacgtcgcgaccattcagtctcgccttggtaacagcttccgtattaccggtattgataacccgaacgaagctcgccaactgtctctgttgctgcgtgccggtgccttgattgcgccaatccagattgtggaagagcgaactatcggcccaactttgggttcacaaaatattgcccagggtctggaagcctgcctgtggggtctggcggtatctatcctgttcatggtggtttactaccgtaaatttggtgtgattgctagtaccgcgctgctcgccaacctggtgttaatcgtcggcgtgatgtctctgctaccgggggcgacattaaccatgccgggtattgctggtatcgtgttaacccttgcggttgcggttgatgctaacgtactgattaacgagcgtattaaagaagagtttaaaaacgggcggtcgattcagcaggcgatacacgaagggtacaaaggtgctttctccagtatcatcgatgcgaacgtcacgacgttgatcacagcgattattctgtatgctgtgggtaccggttcgattaaaggctttgctattacgacagcaatcggcgttattacgtcaatgttcaccgcaatagtgggtactcgtgccatcgtcaacctgctttacggcggcaagcgcgttaacaagctgtctatttaaggagtacgttgtggcacaggattatactgttgagcaactgaactatggccgtaaagtctatgactttatgcgctgggacaacgtggcctttggcatttcgttgttgctgttagtggcatccattgcggttatttctgtaaaggggtttaactggggattggatttcaccggtggtacggtgattgaaatcaacctggaaaaaccagcagatcttgatcaaatgcgtgacactttggaaaaagcgggctttgagtcgccaattctgcagaacttcggtagtacccgtgatgtgatggtacgtatgccgcctgcgactggtactgcgggtcaggaattaggtaaccgtgttatttcggttatcaatgaatctgttgataagaatgcaacggtaaaacgcatcgaattcgtcggaccaagcgtgggcagtgatttggctcaggctggcgggatggcgcttctggtggctttgctgtctatcctggtttacgtcggcttccgttttgaatggcgactggcgctgggggcggttatcgctctggcccatgatgtggtcatcactatgggaattctgtcgttgttccagatagagattgacctgaccatcattgcttcattaatgtcggttattggttactcactgaacgatagcatcgtggtatcggaccgtattcgtgagaacttccgtaagattcgtcgcggaacgccttacgaaatcatgaacgtgtccctgacccagacgttgagccgtactattatgacctcggcaactaccctgatggtggtactgatgctgttcatcttcggtggtgcgatgctgcaaggcttctcactgaccatgttgatcggtgtatctatcggtactgtctcatccatttatgtcgcctctgcattggcgctgaaattgggtatgaaacgcgagcatatgctacagcagaaagttgagaaagaaggggctgaccagccttctattcttccttaaccaaaggcgttagagttaatctttgggttaactccggcgtaataaaaagccccgagaatcgtggactgtagtccaaaatttcggggctttttgcttttaaaccacagtgaaagacggtagcactggttcctgacatctggaactcgtgaagctggccaagttgaggctgagcgggggctggtctgagcactggcgttttagtggctagaaacctttattgagcaggaagtaaagactcgcttaccgcgtctctttcggcatcagcggcgttaaccacctgatgaaaacgaatataacctagctgttccggtgtgagaccgctcagtcgcaactcaatggtgtgttcggtttttggcaaaagagaagcgctaatagcgacgggctgtgacaaaacgtccgcagttaatggctggcctgtcgttggatccaattgtccccactcaacgttggcgctcatggctgggagcggttggtctgtcaggctacggatatgcagcaatgcctgagatccattcgcttcactggagatatcggtcagtgaaaccccaagtttgccgacgctgctgttcaacaccgcaggcgtattggcagccggcaacaggtaaacgccgttaagcgagcggcggttcagcgtgttttgctgctctacggctaatgcttgattggtcagggtttgcagtttttggcttagctggccaacctgatttttcagcgcgggaatctctggatcctgcgcacaaccggccagtactatcactgcggccaataaacaaattcgaggataactggttgtcatcataatgatttccttttcagtatatctatcatctagcttagccccgataaatgggaaagtcattgccaggtcgaggtcttacacataatttcaccaataactgcgcaacgctacgcaacaaatgggcttgagcctttgttgtcgtggcacttcgcggtaaactgtaggcaaatttgggaacaattatcaggaactgctatgcattgcccattttgtgccgccgttgataccaaagtgattgactcccgtctggtgggtgatggctcacaggttcgccgtcgccgccagtgtctggactgtaatgagcgctttaccacttttgaggtcgccgagttggtgttgcctcgcgtgatcaaaagtgatgatgttcgcgaacctttcaacgaggataagctgcgacgcgggatgttgaaagcgttggaaaaacgccccgttagctcggacgacgttgaaatggccattagccatattaaatcccaactgcgggccaccggcgaacgtgaagtgccaaccaaaatggtgggtaatctggtgatggaagcgttgaaaaaactggataaagtcgcctatatccgcttcgcatcggtttatcgtagctttgaagatattcgtgagtttggcgaagaaattgccagattgcaggactgattctttcagagtgggttctttccgtagaatttaaggattagcatgcattccgaccagatttatatggcccgagcttttgaactggcgcgtttagggcgatttacgacttcgccaaaccctaacgttggctgtgtgatcgttcgggatggtcagatcgtcggagaaggttaccattttcgtgccggtgaacctcatgcggaagtacatgcgttacgcatggcaggagacgccgctaaaggtgcgaccgcttatgttacgctagaaccttgcagccatcacgggcgcacgcctccctgcgcggatgcgcttgtcgctgcggggattcggcgggttgttaccgcgatgcaagatccgaatcctcaggtcgcagggcgcggaatgtataggctcaaacaggcgggtatcgaagtcgtggatggggtgatgctggccgaagccgaggcggttaaccttggtttcctgaagcgtatgcgtaccggatttccttatgttcaattgaaaatgggggcgtcgctggacggtaaaaccgccatggcatccggggaaagtcagtggattacttctccgcaggccagacaagacgttcagcgttttcgagcccaaagttcggcgattcttagcaccagcgcaacggtgctggctgacgatccttcgctgaccgtacgttggtcggaactggatgcagaaacccaacgaatttacccgcaatcggcgctacgacagccaactcgtattattctggatagccagaatcgcgttgctccaactcatcaggtggtgcagcaggagggaaactgctggctggcaagagtcaaggccgatcagcagccgtggccggatagcgtcgagcaggtattgctcccacatcacggtaacggcatcgatttggtcttgctgatgatgctacttggcaaacgccaaattaactcggtctgggtggaagccgggccacagctggccggcgcattattgcaggctggcttggtcgacgaacttatcctctatgtcgcgcccaaattactcggtgatagcgcccgtggtttatgccatttgcccggaatggatcaactttcccaggcccccgagttcagctttagtgaagtgcggcagataggccctgatttacgattacgcctaaaaccgaggtattaaccccaatttatggtaggagattttcctaccggtggccgtcttgtcgggcgttttacaaatgcgcaggcgcaggcagcgaaagaatatgatagaatccgcccccctgcggggtatgaaccgatattgaggaaagctatgaacgttatcgaaggtgttgttgctactcctactgcccgcgtggcgattgcgattgcgcgttttaacaactttatcaatgacagtctgctggaaggcgcaattgatgccctgaagcgcattggtcaggtctccgacgacaacattaccgttgtttgggtgccgggtgcctatgagttgccgttggctgttaatgtgttggcaaaaactaatcgttatgacgcggttatcgctctgggtactgtgatccgtgggggcactgcgcactttgagtttgttgctggtgaagcaagttctggcttggcaagcgttgccatgaacagcgatatccctgtggctttcggtgttttaaccactgaaagcattgagcaggctattgagcgcgctggtactaaagcgggtaataaaggtgcagaagctgccctgaccgcacttgaaatgattaatgtaatcaaagctattaaaggctgaatttagttaagttaaggggaattctgtgaaacctgctgctcgtcgccgcgctcgtgagtgcgctgttcaagcgatctactcatggcagttgtctaaaaacgacatcgctgatgttgaattacagttcctgtcggagcaggatgtcaaagatgtagacatctcctattttcgcgagttgctgtccggcgttgcggtgaatgtaaccgcgctggatgctgcaatggcgccgtatctgtcacgccaactcgaagaattaggtcaggttgaaaaagcgattctgcgtcttgcgatttttgaactgagcaaacgtgatgatgtcccttataaagtggcaatcaatgaagcgatcgaactggccaaaattttcggcgctgaagatagccataaattcgttaacggcgtgctggacaaagttgctccagtcgtgcgtaaacgaaaataatcgcattacatcaacgatataaattaaggccggtttccggccttaatttatatatcggctaacctttctggaattgtattatggcatgtggcgaatttgacctcattgctcgctactttgaccggttcaggagtaaccgccgggacgtggagttgggcattggcgatgactgtgcgctactaacagtcggtgaacgacaactgttagcggtcagcacagacaccttagtgtcaggcgtccatttcttaccggatattgacccggcagacttgggctacaaggctttagcggtaaacctcagtgatttggcagcgatgggcgcggacccagcctggctttctttagcacttaccctccctgatgtgaacgaatcctggctacaggcattcagtgacagtctgtttgatcaactcaattactatggcatgcagcttatcggcggtgataccaccagtgggccgttaagtatgacgctgactattcaagggcttattcctgcgggcagggcgttgacccgatccggtgccagaattggcgactggatttatgtcagtggcaccttgggtgatagcgcggctggcttagccattctgcaaaatcagctgcgggttgaagatgcgaaggatcgggctgaactgatcaatcgtcatctgcggccacagccacgggttctgcaagggcaggcattgcgggatttggctaattcagccatcgatatttccgatgggttgatttccgatctacagcatattttgaaagccagcaactgcggtgcacgtatcgagctggacgccctaccttattcagatgcgatgaaaaatcaggttgatcctgagcaagcgctgatttgggcactcagcggcggtgaagattacgaactgtgctttaccgtccctgaaatcaatcgtggggcgttagatgtggcgctcagccacgccggagcgggctatacttgtattggtcagatagctcctttatccgaaggggtgaagttctttagcgatggcaaacctgttgacgtcggtttgcgcggtttcgatcactttaccagccaaggctaaccatggatgaggcgaagaaacgtctgcgattaaccaatccttggcatctgctggcgactggttttggtagcggtttatcgccgtgggcaccgggcactatggggtcgattgccgccattccattttggttgctgttgatccaattgccttggcaactttactctctggtcgtgatgtttagcatttgcattggcgtttatatttgccatcgaaccgctaaagatatgaaagttcacgatcacggcagtatcgtctgggatgagtttgtcggaatgtggatcacgttgatggcattaccggtgaatgactggcagtgggtgctggcggggtttgtcgttttccgtattctggatatctggaaaccttggccaatccgttggtttgaccgaaatcttcatggcggtatgggtattatggtcgacgatatcattgctggcgtgggggcagcggcagtgatttattttatcgggcaccaatggcctttagcgctttttggctaataccagaacaactcatagcatggcaagtcactaaaaaatttagctttctttccgtggtgtgggttaggtttatctgatgagaatatgctaaatagaaaagggcatagcgtttaagctgtgcccttttgcgtgatatcagccccaattatgggtaatggccgattaagctagccagtcttcaattgtcttctgaatacccgctgcgcttaaaccaaattcggcgcgcatttcatcctgctcaccttgcggaataaagcgatcgggtaaaccgatattgagtaccggaacttgctggcgttttgccattaacagctcgttaataccactgccagcgccacccatgattgcattctcttccagcgtaaccagtaaatcgtgacgggctgccatttctaataccagctcttcatctaacggcttgataaagcgcatatccactaatgtagcattcagattttctgccacctgctgcgcttcagaaagcaatgtaccgaagctcagaattgcgactttttcaccctgacgacgcacaatacctttgccgataggaagagcctgtaatggctctaaaactgcgccagtaccattcccgcgagggtagcgtaccgccgctggaccgtcgtagtggtagccggtaaataacatctgacggcattcattttcattgcttggcgccatgatgaccatattaggaatgcagcgcataaatgatagatcgaaagcgccctgatgggtttgtccatcagcgccgacgataccgccgcgatcgatagcgaagagtaccggtaaattaggaatagccacatcgtgaatcagctgatcgtaagctcgctgcaagaaagtcgagtagatcgctacaaccggtttatagccaccaatcgccagaccggcagcgaaggtcaccgcgtgttgttctgctatggccacatcgaagtactgctgcgggaattcacgggagaaccgcaccataccagagccttcgcgcatagcaggggtaacggccatcagttggctgtctttttcagccgtttcacacagccaatcgccgaatattttggaataggtgggtaaatcgcttttgctttttggcaaagtacctagcgcaggatcgaacttaggtaccgcatgccagccgataggatctttctccgctggtgcgtagcctttgccctttttggtcataatatgcagaagttgcggccctttgaggctacgcatatttttcagcgtttgggttaaagcttgtacgtcgtggccatcaaccgggccgatataattaaagccgagctcttcaaacagcgtacccggaaccaccatacctttcagatgttcttcagtacgtttgagtagttctttaatcggcggcaggccggagaaggctctttttcctccttcgcgcagcgtggaatacagttttccggataataattgggccaaatgattattcagcgcgccgacgttttcagagatcgacatctcattgtcgttgagcacgaccagcatatccggattgatatcaccggcgtggttcatggcttcaaacgccatacctgcggtaatcgcgccatcgccaatcacacagacggtacggcggcctttaccctcacgttcggcggccacggccatacctaagccggcactgatagacgtggatgaatgcccgacggataacacgtcatattcgctttcatcacgccaagggaaaggatgtaaaccctctttttgacgaatggtggcaatacgatcgcgtcgaccggttagaatcttatgaggatacgcctgatgaccgacatcccacaccagatggtcgaacggcgtgttatagacatagtgcaaggccacggtcagctcaaccgttcccaaccctgacgcaaagtggccgctagaacggctaacagagtcgagtaaatactgtcgcagctcatcgcatagcttgggcaggctttcttttggcagtaaacgcagttcctcggggttctccgcaagtgccagtgtcgggtatttggctatatcaagactcattcgatgctcatatcagaggtgtttacgtaggctgctgcattaccattcccggcagggcagtgccgggatcagaaatcgtctgaacaccggtgcgctggcggcagaatattattctgcacgagtaacgcctactggattaattgtttctaattatcgcgttcaattataaaactcgctagcgcccgcagtgaggcggtgtcatacgacagttcagccaaagcatccagcgcttcgagataaagatctctggctttggtttgggcagcttccagacccagtagggccggataggtgcttttgcctaactgttggtctgaaccctggcgtttgcctattgtagcggtatcaccgataacgtctaaaatatcgtcctgaacctgaaaggcgaggccaatggcatcggcgtagcgatctaactgttccaaagcccgatggccgggttttcccgcagccaatgcgcccatgcgcaccgcggtacggatcagcgcgccggttttatgacgatgaatttgctccagctccgtcagtgaaatatggcgctcttctgctgccagatccaatgcctgtccgccacacattccggctacgccgctggattttgccagttcggacagcatgctgacgcgatcctgcatggcgacgtccggcattggcgcatcggctaaaatgctaaatgccagcgtttgcagggcatcgccggctaaaatcgcgcaggcttcgccaaatttgatatgacaagttggctgaccacggcgcagatcgtcattgtccatcgccggcaaatcgtcatgtatcaaagaataggcgtgtatacattctaccgctgccgctggcgcatccagcgtcgagagcgacaaaccgaacatttggccggtggcgtacaccagataggggcgcagtcgtttaccgcccaacaacgtgccataacgcattgcttgcactagctcgctgtcgttaaacggcagcggtgcaataaaactcagtaatgcatcattagctcgttgttgatatatcgccaactgctctgtaaaaacaacgggttggttcatttcgttctgatgggacatgtttattcggtatccggcgtaaaaggcgtcagcggcgcatcggtgtcatcactgagcaatatctgaacccgttgttctgcctgcaacagcgtttgctggccttgacgagccaactgtatgccgcgttcgaattcgttaagcgcatcttccaacggcagttcacctgactccaggcgggtcacaatttgctccagctcgctgagtgaagtctcaaaactggcgctactttttacggtagcctctggcttatccgtagcttctggtgatgcagcttttctaggcatattttattttcaacgttaagttggcgtcatggggccggtgggccactctcggttttgggctattgtaacgaattatgccgagcaaatcgtggcgtttgcttcgggttttattaagcagatatccactatatggtgatatactccgcgccttgaatattattggtaaggcagacagcccggagttagccttaacgataacatcgtccatttactcagtgactcgctatttaccgctgcgtcgtccggtcattttgactcaacagtattgttctttcgatagcaacctaattcactcatcatactagacaactaaagaccgccatgaagtttatcattaaattgttcccagaaatcaccatcaagagtcaaactgtgcgtttgcgcttcattaagattcttactaccaatattcgcaacgtgttgaaacaccttgatgactcgctggcggtggttcgtcactgggatcatattgaagtgcgtaccaaagatgaaaatcttggccccgcgatctgtgacgctttaacccgaattcccggtattcaccatattttggaagtggaagaccgtagttacaccgatctacacgatattttcgagcaaacgctggaagcttatcgtgacacgctggtgggcaagaccttctgcgtgcgggtaaaacgccgtggtaagcacgagttcagttccggcgaagcagagcgctacgtcggcggcggtctgaatcagcatattgagacggctaaagtgaaactgactgcgcctcaggtcacggtcaatctggaaatcgatcaagataaactggtgctgatcaaagctcgtcacgaaggtttgggcggtttccctattggtacgcaggaagatgttttatcactgatttctggcggttttgattccggcgtgtccagctatatgttgatgcgccgcggctgtcgggtgcattactgcttcttcaatcttggcggttcagctcatgaaattggcgtaaaacaggtggctcattatctgtggaaccgcttcggtagctctcacaaagttcgttttgtggcgatcgattttgaacctgtggttggggaaatcctggagaaagtcgaagacggtcagatgggcgtagtgctgaagcgcatgatggtgcgagcggcttctcaggtcgcggagcgctatggcgtgcaggcgttggtaaccggtgaggcgctggggcaggtttccagccagacgttgaccaacctgcggttgatcgataacgcatctgacacgctgattctgcgcccgctgatttcccatgataaagaacacattatcaatttggcgcgcgagatcggtaccgaagactttgccaaaaccatgccggaatactgtggtgtgatttctaaaagcccaacggttaaagcggtgaaagctaaaattgaggaagaagagtcgcactttgatttctcaattctcgatcgtgtagtgagcgaagcgaaaaacgtggatatccgcactatcgccgagcaaagccgcgaacaggtggctgaagtagaaaccgtagcagaactggctgataccgatgtggtgctggatattcgcgcgccggatgagcaggaagagaagccgttggttttggctccggtagaagtacggaccttgcctttctataagttaagcactcagtttggcgatctggatcagagcaaaacctatttgctgtactgtgagcgtggcgtgatgagccgtttgcaggcgctatatctgcgtgagcagggctacaagaacgtaaaagtttatcgtccataactgagacggtatctgattctgaaagggcgctaatgcgccctttgttatttccgaaagctaatagcgatagtcttttttatcgatgccgtatttcttcatccgtagatagagctttttgcgcggtacttgcaaatactctgctacgtcgttaattcttccctgatggatatttagcgcctcattaattatcttcagctcatactgttcaattcgttcatccaacgggccacagtcagtttcagtcacccattccatgctggtttcggtcaatggcgtcacgccaacggcaaataattctgccgcgtttaataactctcgaatatttcccggccacggacggcgacacaacctttttacgaaagcctcactcagctgtggctgctggcgatccagacgtttacaggcattttccagataatggcggaatagtacctcaatatcgccagggcgctttgccaagggtaaacactcaatatggctaagagaaaatcgatagtagagttcgggaaccagcaattgctgagcggccaactgtgcaggtaaggagttgctcaaagcaattaaacggaaatgacattcttcagggttttgcagttgcgccaaagcacgctgttgctggctggcgagccgttcaatgttttttactaccaatgtaccgttctgtacctgattgatgtaactattgaggtcgatattctcatcgctggtaggatcgatgatgatcaacggattattgcggcgttggctcagttggtgcagatagcgtgccgccagagagcggccggttcccagctcaccgtaaaaaaataccggcacatcaatatcggccagcatctgcaggcgttctcttagttgccgaacccaaccgctgttgcccaacagatgttcgctaagctgctcccgctgccagtgacgacgagcaatcagagcctgtctatctgccagcgccagctgaacgcattgcagtaatttttccggattgactggtttttccagaaagttataggcaccttttttcaccgcctccaccgccatgggaacatcgccgtggccggagatcagcaatatcggcagatgacgatctttggcgagcaaaatttccagcagagccatgccggaaaggtttggcatacagacatcgctgatgaccataccctgccaatcggtggtaataagttctgctgccgcctgcggtgagctgtatgccgctacctgataaccttcttgcgtcaggatctggcaataggcgtccagcacatcaatatcgtcatcaatcagtaaaatttgctgttcatcagttaacatggctcagactcctgaattgcaatatcaccattccgtggtggtctaatgttgacgccaaccgcagctctcctgcgcactgctccataatggactggctaatcgatagaccgatacccagtcccacttctttgctggtcgtaaaaggtttaagcaatcgatccgccagcgctagcggccagccctgaccattatctcgcagagtcagcaatagattttctgcctgttgttcgaaagaaacctcaatgattggcggatgttgagcgctggcttctagcgcgttggtcaataagttgaccaacacttgctgaatacgaatatcgtcgccgtataccaaagggaaactttctggctggatgaaccgcgccttgagtggacgatgacgcaaggataaaagatcccaggccgcatccagattggctcgtagatcgatggggtgtaactgttgatgtgcatcgctgcgacgggagaattgtcgtagctgcttaataatattcacaatacgcagaatcaaaccgcgcattttatccagattggcctccagcatggcgttatcgccgtttttaagcgctttttcactgctgaataaatacagcgacagggcattgagaggctgatttacctcatgagcaagggtggtcatcgtctgcccgactaccgccagtttagccgcctgaatcagttcatcttgcgcagtacgtaaatccttctcaatgagccgtctttcatcaatctcttgtttaagctgatttttttgctgattaatctggccgatggtgcggcgcagtaatccagcaattcgccccagttcgtcccctccgtagaccggaatagttgtatccagttcgccgcagcctaaacgcgctaccgattgatttaacagggtaaagcgtttgatcaagcgtgagcgaatatagaaatgattgagcgtaaaggcaaacagcagagccaggagggttgcgacaataatcagcaggccgctgatgcccataatatcgccgaggcgttgattgaaggtttgtaactgctggtggctgttgcccaactggttttcaatctgactgcgaaagcgagtgagggtttgctctttcgcattcacggtttcctccagcaatgccagcgccgttgcccgttcttgcaaaatagccggcatttttagctctgcggtgcctaaattgagcaattcatcgatagtctggcgcagagtgatggtgctgggatgttttgccaacgattgcatgttggattccgcagtttgctttaggtagctcaggtaacgaatgtgattattcaggctatcaatattcggattggccagttgttcgcgcagatcgtcaaccacctgagtttcaatgtgcgcaagggcgtaaaccagctgtaattcatcctgaacattgcgcagcgtactttgcaactggtgatttttttccagactggttttctgcgttaattgatcgatgagcgagccttgctgccagctaatatcctgagaaagcgacgttagctcggtattgaaatcatcgtgaagccagttaatccgtgctgcgagctcggtgatcttttctctggcgaggaaattactgtatagcgcactatccaatcgagaaagcagttcccgacttcgggtcaacgtcgttgccaactggcgctggctgtccggtgtcagacgtcggctggccatttcgatggtatccagccgatgagcaatctgatcgcgcatttgaatacgcgccgttgtgttgggggcatgctggaattcattcaattcctgaatgagtgcattcagattttcttccagctgaaaggacgcctgaattttaggaaagtaatcatccagcgcatagcgaatctggctactttgggcgtgccatgaatacaaactgacggcgctgacaaacagagtcagtattgcaccaaaggcaaatgcccagcgcaaaatagagctgatagtgatgcgatagaaaagcgggttcatttcagcgattccaactgttggatcgccaaatgctgctgtttttggaagaactgttgccaaatcattagctctgactccattgcgttatccggcccctggttaaagcgttgcagataatccatatccacagcctgctgcggagtgacgggtacggcggtcagcaatgcccggatttccggcagagggcgttttagacgagcttcggcgctgtgcaaagctttccacgcatcctgtagctggtgcaggcggaaagtgatcgcggtatcaaacaattgctgcacgagtttctgccgttgcaggatctggcgataatccagcggcgtttgctgtaataagcgctgttgctgtttggcgcgcggatcttcaacgggtaacggggaaactggatacttgccggtatcggtatctgaaagtgctttttgcccgctgtcactcagtagaaaattgatgaaacgggcggcgtcggtttggcgcgagctgcctttcgtcatggcgataaaagtcggtgaagcgccgctttcaggaaagtaactgaaactgagctgcgggtcttttagcaacagagtggcgtaattatcgataatggggccggcaaggccgagtccggttttgattttattggaaacgccaaaactgcgggaagaaattgtggccagattaccggaaatttccagcagggtttcccagccttgctgccagccccgttgctgtagcaatgtttctatcatcaaatggttagtgtcggagcgagaagggctgctcattaaaatcatcccttgatagcgggcgtcttttaatccgtcccaggtgaccggcgtgggtaaatgcttttcttttaagcgtgcgctattggccagaatgccatagccggaaatggctaccgccgccgtggagctgcggatggattctggaacgcgttgctgattatgtactgccagcgtaggcaaggtagccaaacgctgatgatcctgcaaatgctgcatcaacatcggggatgaggtcagcaccaaatcgatattttcccccattggcgtatccagtaaacgctctagggaagagctagtgcgatttagcgttcgaatagaaactgcctgcggctgtttatgccattgcgcaatgatatgcgcggtagcttcgggggagaaggtggtggcaataaccaattcattagcgtaactcgcgggagctaaactcagggcaataattaggttcaagagaatgttgcgtaaactttgcatctatttattcgccccggttaatgtgtgattaatatcaaataaataacaaataaatatatttatagcgatggccggattgttccaatttgtcccatttttgtcttttttaacgcgtaaaaataaagaaagacaaaaatgagttaattttgactcataaattttgggttgttgtgtcaattttgaaacatatcccttaggttgcaccaattcgtcagtcgctgcatgctgactgcgaaacataatgacgcagtggcgctgggattatcaactgctttgtagtatcagacactttattttattcagacaatgtctgcgataacagacttattggcttcaacgccagggaaatccatttttctaaataacaatttaataataaatctttaaggtgaactatgctctcatttatgaaacccaagatagcaacccataaagttcccgacgataaagtaatagctacatataatcgttatcgggttcaggcgttgttcagtatatttattggttacctttcctactatattgtgcggaataacttcacgctttctacaccttatttaaaagaacaattgcacttaagcgccacggaaattggcatgctaagtagctgtatgttaattgcctacggtattagtaaaggcatcatgagtagtttggcggataaggccaatcccaaagtttatatggcaatgggtttgctactgtgcgccttggtcaatgtaggattggggtttagcggcgcattctggctgtttgccgtattagtcatctttaacggtttcttccagggaatgggagtcgggccttcctttattactatcgccaactggttcccgcgtcgtgagcgtggccgggtgggggctatctggaatatttcccataatgtaggcggcggcgtggtcgcacctatcgtcggcggcgcattcgcaattttaggcagtgagcactggcaaaccgctagctatatcgtgcctgccattattgcggtgattttggggtcaatggtattgctgttgggcaaaggttctccggttagtgaaggcttacctccgttacaggaaatcatgccggaagccttggtgattgagccagttaaagccgggcagaaagcaccggaaaatatgtctgcattccagattttctgtacttatgtactgaaaaacaagcatgcctggtacgtgtctttcgtagatgttttcgtttatatggtgcgtttcggtatgatcagttggctaccgatttatctgttgactgaaaaacacttcaccaagggcgaaatgagcgtggctttcctgttctttgaatgggcggcaatcccttctacgttattggccggttggttatcggataaattcttccgcggccgtagaatgccgttggcgatgatttgtatggtgatgatctttatctgcctgatcggttactggcagtgtgattccctactgatggtgactttctttgcggctatcgtcggttgtctgatttatgtgcctcagttcctggcttcagtgcagaccatggaaatcgtaccgagcttcgccgtagggtcagcggtgggcttacgcggctttatgagctatatccttggagccagtttgggtaccagcctgtttggcgtaatggtcgatagagtgggttggcacggcgggttctacttgctgatgggggggattatttgctgcattatcttctgctatctgtcccatcgcggcgtgctggaactggagcgggaacgcaaagatcagcaggtacgtttagataaagaagcattagcttaatcttagggttaaaacagccgttcagcgtcgaacggctgcgatatgaatcagttacggtaattaaagatgcccggcggcagaataagctgacgggcgacttcctcagctttttcccttcccaataataaaaagatgatttttaatgcaaagtcgatagaggttgccggcccttggctcgtaaccagattgactctacgatcgtagaccactcgctgatccatccatttattcggtgaaattttatctttcaagccgggataaccggtcatattcccgatggggaataggttatggtgttctaacaccaaagccggtgccgcgcaaatggctgcgaccagatggccttcattatgagtttgccgcactttttcgaccagcagcgggctatcacggaaacattctgccccttttattccgccgggtaataccactacgtcaaattgttgatcggccacatcgaccagacgcgtatctgccaccagttttacaccgcgagagcaagtaattactaactctccatcaccggctacgcttgcggtcgtcacttcaaagccgccacgtaccagcacatcaatggtggtgaccgcttcggtttcttcactcccaggtgccaggcaaaccagtgccgatacgctcatacacattttcctttcgtttaatcgaatcgtacaggcgtgaattttccggcagcgtcatgccgtgactgcgcgcccgacgtagtaaatagccggtgatatagtcgatctctgtatgtctctgcgcacgtaaatcctgaagcatggaggagacgttatcagccgtactttgaatcacttcctgcacataataaagcaggctttcggtggaggtatggaaaccttccatttccattacatcggcaatttctgcgcataatcgcgttaccagctcaggataacgctgtaggtcaccgtttcggcactcatacaggccggtaagaggattgataacgcagttgaccgccagcttatgccagcaggcggaggaaatatcattgtgccatgcgacgtccggcagggcgtggtgcagtatatccgccagataactgacatctttgccgggggcaatcgcggggccaatatgagatatgccgccggcaacgtggataatggtattgccgtcaggtcgcgctgcatgagtcgttacgccgtgcaggaaagtatttaccgcgtccggtaactcttcctgcgtacccattccgttatgcaagagcaaaaccgtgcaatccggattgagtttaggcagtagggtggttaccgcgctggaaacttgccaagctttcaaacataccagcagtaactcgctttctgctaaatgctgcggatcgttggtgggcagattttgattgaattcgtcaccttcaagggtgatgacattcaccgaacagtagggttgaggcactcgcaaccaaccctgaacatcatggccttgttggtacagagccgataaccaaagctgcccgagcgcaccgcaaccaagaaccgtaatcttcataactctctccctggtgtaaacggaaaacgcgctaaatatttataagtgttatgcttggattatagactttttcttcattaaacgctgagttagctacgttctgtggcgaaaatgcgaacagccagcggcttgattttgtctacgacgataaagcggttattatgcttgccattcatcttatatggaggagggaatatgccatctttcgacatcgtttctgaaattgatatgcaggaagtgcgtaacgcagtagaaaacgccacccgcgatctggcaaaccgttgggattttcgtaacgtcccagctagttttgaattaaatgagaaaaacgaaagtattaaagttgccagcgaatctgattttcaggtggagcagttgctcgatattctacgggcgcaactgagcaaacgtggcatcgaaggtgcggcgctggagattccggaagaaatggatcgcagcggcaaaacctacagcgtggatgccaagctgaagcagggcattgaaagcgcgcaggccaagaagctggttaagttgatcaaagacagcaagctgaaagtgcaggcgcagattcagggtgaacaggttcgcgtaaccggtaaagcgcgtgacgatctgcaaagcgtaatggcactggttcgcggtgcagatttggggcaaccgttccagttcaataacttccgcgactaagctcaaagtctgattgctgataacagtaataaaggctgctgattgataaagaggaacaaatgcccatttacagcttttgttcctcatctcatcatcgatgcttcttacacagcgttaaccagttgttctaactgatatcggttcgttttcttgatatctactttcacataagcgctgcgttctgccgctacgactatcgcttcggtcacgcctggctgcgctttaattttatgttccaaggccgaatctttagccgctaattcggacagcgtgatgcgtaagctactgacataaggaggttcctgcatcgttgcgctaacggcaaaccacaccaaagcaatgaccgaaccggcgataaacaccactcccgcaccgtcgagcccgaataaccaaccgcccaaactgccgccaatggctacgccgataaactggctggtagagtaaattcccatcgccgtacctttgtagccagcgggagactccttgctaatcaacgaaggcaaaattgcctccatcacattgaaggcaataaagaagagttgcacaccagcgataatgccccacaggtgttcaccggatgcccacatcactacttcggcgatcagcaatacggccacacagcccataaacacctgtttcatccggcgtttgacttcggcataaataataaatggtactaccgccgcgaaggaaaccagcattgtcaccagataaaccttccaatgctgttcgggcagtaagcccgctttggccatggcctgaggcagggcgacaaagctcgacatcaacagaatatgcaggcacataatgccgaaattaagttttagcaaccggctgtttttcaatactttattgacgctgccttttactatgctggattcgcgatttaatacatgggtatccgcagaaggcaccactgccaacgtgataacgatgcccagtaacgccagtaccgctatgccccaaaatagtgcattcaggccataggcgtgggtgacgattgggccgagtaccatagcaatagcgaaagtaataccgaagctaacgccaataaatgccatggctttagtacgattttgttcgcgagtcagatccgaaagcaaagccatcactgcggcggcaatagcaccagaaccttgtaatgccctgccgaggataatgccccaaatagaatcgctcatggcagcaatcacgctacccagcgcaaaaatcagtaacccgccaacgatcagaggtttacgcccaatacggtcggatattaatccgaaaggaatctggaatattgcctgagccagaccgtagataccgatagcaataccgatcagtgcttcactggctccggccaaagccatgccataggtggtgatcaccggcagcaccatgaacatcccgagcatgcgcagtgaaaaaaccgttcccagcccccaggttgcccggagctctaacggagtcattttgttatcgttcattaccacctcaaaaaaacttattgcactattgtaatgattttagtgccaaccggtaaatctattgatgtttagaatatattacagccagagtgggtatcttccggaaaaatagagtttatcagacggttgataggtgtattcaaaacgagaggaatatacagtctgatggcaaaatcaggtatgaataaaacagggtagggtagaaaagaggaagcgaccggctggaaaccagcgaggccgcttcatggaactttcggtgtgcttacccgacgtaagtcagtaatgcagcagatgacggaacgttgaagtctacagacatcattacactcaatgaagtaatcgcaatgattgagaatacgaagagttttctcgcccatacgctgtcattcgttgctttgtagccacgcagagccattcccaaccaccagacgctgactgccgctgcgactaccagatatttatatccggcgtagccgctgagagtcagcatcagtgttgctaccataaatgccagaatatacagggtgatatggtttttggtgaccgatatcccttttataactggcaataccggaatattcgccgcttggtaatctttaaagcggaatatggcgatcgcgtaggaatgcggcatctgccagatgctgaagatcaataacaggatcaatgcgccggtatcaaactggcctgtcaccgcgcagtagccgataaccggcggagccgcaccggacaagctgcctatcaaagtgccgtataccgacttacgcttcatgtagaggctgtaaaccccgacatagataatgaaacctatgacggccagtgccattgctaacacattggccgccacataaagcaacagcatgcccgcaatacccagtaccgatgcataaatcagggttatcttcggttcgataaggccttttaccaaggcccggttcttcgttctctccatgatgcagtcgatatcacggtcgatatagttgttaaatacacacccggaggcaacaactaacgaaacaccgattagcgtggcgagaaaaagggggtaatcaatatcgcctttagaggcgaggaggaatcccccaacgacagaaattaaattgccgaaaataattcctggtttagttacttgcaggtattgcttaatcatcacatgcagctctttagtcaaccatcatattgatgttgaggttgtacataatccacagcgagcccacaacaacgatcgcgataatcattacggtgaacaggaacgccaccaggttccagcgctcttctgacttaccattcatatgcaggaagtacaccaggtgtacgataatctgcaccacggcaagggtcacaaccgttgccagaatcatggtatgagaagcggtgccctgcataaccatgacaaacggaatgactgtcagaattactgacagaacgaagccgattatataggacttcaggctgccgtggcttgctccaccgtgaccagtagttgaatgactcatttacatggctcctaacagataaacaacggtgaatacgcagatccacaccacgtccaggaagtgccagaacagactcaggcacatcaggcgcgtttgattggtagggttcaggccgcgtttcgctacctgaatcatcataatgataatccaaaccaaaccagttgttacgtgaataccgtgagtggcaaccaacgcaaagaagctagacaggaacgcactgcgatccgggccgtagccttcagcgatcaggtgatggaattcatagatttccatcgccacgaagcccaggccgaacaggaaggtcatacccaaccagagatttacctgatttttgttgcctttgttcatacccagcatggccatgccataggtaatactactaaacaggagcaggaaggtttcgaccaaaacgaagttcaggtcaaaaatgtccttacctgtagggccgccagcggtcccgtttaccaatactgcataggttgcgaacaaagtcgcaaacagaatacagtcgctcatcaggtagacccagaagccaaagaccttggtggctcccgcatcgtggtgcccatgctctgcatgggctacgttgtggttagtcagagtttcagttgacatgattcacgcctgcttttctgatttgttcatggtgaagattttcaatgcgctcaacttcttctgccggcacatagtaatccacatcttcgtcgaagcttttcacgatccaggtgacgatcatgccaacgaagccggcgatagccatccaccagatgtgccagaccatggcgaagccaaagatcagactgaaagctgcaatgatgacacccgcgccggtattcttcggcatgtggatctcttcatatttagccggacgcttgtaagcttcgcctttctctttcatgtcccagaattcatcacggtcaacaacttcaggcactacggcgaagttatagaacggaggtggggaagaggtagaccattccagcgtacgtgcatcccacgggtcaccggtcagatcgcggttttgttcacggtcacgcacactgacgaagacctgaataacctgacacagaataccgcaggcaatcagtactgcaccgcctgctgccaccatcaacatcgggtggaattcagggttaatatcctggcttaaacgacgggtcatacccataaagcccagaacgtacagcggcataaaggctacgaagaaaccgataatccagaaccagaacgcacgtttgccccaggtttcattcagcgtgaagccgaaagatttagggaaccagtaagtcagacctgcgaagcaaccgaatactacgccgccgatgatcacgttatggaagtgagcaatcaggaacagactgttatgcagtacgaagttcgcacccggtacggctaacagaacgccggtcatcccaccgatggagaaggtgatgataaagccaacggtccacagcatcgcagagttgaactggatacggccttgatacatggtgaacagccagttgaagattttcaccccggtcgggatggaaataatcatggtagcaataccgaagaaggcgtttacgttggcacctgaacccatggtaaagaaatggtgcagccaaacgataaacgacagaacggtaatggcaatggttgcccatactaatgaggtataaccgaacagacgtttcttcgagaaggtcgccgtgacttcggagaacacaccgaataccggcagaaccaggatatacacttccggatggccccaagcccaaatcaggttaatgtacatcatcatgttgccgcccatatcattggtaaagaaatgggtgcccatgtaacgatcaagagtcagtaacgcaacggttacggtcaaaatcgggaaagaaacgataatcaagatgttggtacagaaagccgcccaggtgaagacaggcatcttcatcatggacatgccaggagcacgcatcttaagaatagtcgcgaagaagttaacaccggtcaacaaggtacccagacctgaaatctgtagactccatatccagtaatcgacgccaacgcccggattgtactcaatgcctgacagcggcggatacgccaaccagccagtctgagcaaattcaccgactcccagagagatgttgatcaacaccaccccgacgacgaagaaccagaaacttagggagttcaggaacgggaaggcaacgtcgcgagcaccaatttgcaatggtacgacgatgttcatcagacccaccacgaaaggcatcgccatgaagaagatcatgattacgccgtgggcggtaaatatctggtcatagtgatgaggtggcaggaatcctgcctcgccagccgaagcaagcgcttgctggcttcgcatcatgatggcatcggcaaagccacgcaacagcatgaccatcgctaccagaatgtacatgataccgattttcttatggtcaacggaggtcaaccattcgctccacaaccatttccatttgccgaaataagtcagggcggcaactaatgccagaccgcctagaataattgcagcaacggtaaccattatgattggttcgtgtaacggaaccgcatcaagtgttaattttcccaacatcgtttattcctcggctccggcgtgagagtggtcgcccatttccatgcctttgctcatgtccatgcctttatgcatgtcatcgctcttgtgcatgttcatatcgcccataaatttgccaatcgtttctttaaacagctccggcttaacgctggagaaatactcaaccgggttattttcgctcggctcagccaatttatcgaaatcagcagtggtattcagggtgtttggcgattttttcacctgcgcgacccactgatcgaaatcaccctgagtcggcgtagcgatcgcagtgaatttcataccagagaagcctttaccgctgaaactactggaaataccgttgtatttaccggcttcattggcaatcagatgcagtttggtttgcatcccggccatcgcgtaaatttgtccgcctaactgaggaataaagaacgaattcatcactgagttggatgtgatcttaaagttcacgggaacatcagtagggaaggcgatttcattgacggtggcaataccttgttctggatagataaacagccacttccagtccaaagaaaccacttcaatagtgatcggttctttaccttcgacaaccaaaggtttgaacggatcaagttcgtgagaagttttccaggttatcgttgccagaatagcaatgataatgattggtacagcccatacaacaagctcaattttgttggagtgggaccagttcggggtataggttgcatttttgttggaagcacggaacttccacgcaaaggcaaacgccataaaaataaccggaactactacgatcaacattaaaccgatagcggtgagtatcagcgttttttgttcgagtccgattgtgcctttagggttcatcaataccatatcgcaaccagcgagtgttaccgtggctgcaaataaagacaacatcccaatatttttaatgtatttcttaagtctcatctaacgacctcaattacaaagggctctattgtcgtttcaggtgtgcgggcattttacgggaaggttgcaggactgtaaacacgcttaaggttgtgtcagcggcttgttgacactttatgttaagggggtcacagatgttgctctctttgataattttctaattgcaacaatatgttggcgcaagagttaattaacaagcgtaactaaaagctaactatattaaggaaaaacaatgccaagcaggattttattgtcgggaaatacagatttgggaggagtttatttacgattttatgtaaataatatgtatcttaaaagtgaattaaaatatattccggggtaaccaaaatggtttccccggaatcatttagttagaaattatatttaattgagtaaacgataccgtcttgtaaaaagtcttcgcccagcttgttataagcataacgatactgaataccagtggtgaattgtttcattggtgtccaccacagtgcaatagcaccgttcaccccgttacgaccgccgttacctgccgcatagcgttctgcacggttaaattccagctcgttccagttagtaatgctgaatttctcatcgaaagcggtgaaatcgtagccagcaacccaaccaacaacataaccgttattacctgagtaataagtttggtcaacgtagtgcagcgcaacgaaaggcttcatccatacgccagcaatggtggtgttatagccgataccgtacagggtattcacttcgtggaagttgctgtagttgttgccttcagcagctggcagagagtaggtgccataaacgtggccgtataggttaaaaccggtgtcgcctaaatagtagcggccagtggttttaaaggtgtaacgctggttatcgcccggctgagcagttttggagttgaacgggttttctaaatcgaagaagccgtaaacttcaccccagctaaaacctgcgccgccctctaattcaatataggcaaagtcatctttatgagatgaaccaccggatttatgcgtagtgctcttcgtccaatccaggtagttcatgctgatattgccgaaaccccattggtattcagcttgcgcagaaggagccagagtgaccgcagttagcgcgatggcgccaacgagaattttacgcataaaagcctcaattattgttaaaaggtgtcaggggaaataaaaggacatatgtccttaataaaaagtgcgcacatcatagtctgacagcacaaaaggttaaagacctgagggtgatttgaatctcattttaagaataatatttctgattagttgcttaataatgtgatcatgattgtggttttgtcgggtgtatacccagttgactaacttttacgtataaaaaagccggtaatagaataccggctattggtgaagcaacgtgtcgtcttaagtcaagcgggcgcgacgcagtgccagataatccagcgctccacccagtatcattccaacaatactgagttgaatccctcgtaatagcagcacatcggccacttctggcgctgcggtccatccccaggcattgctgattaatagcaccagccacgcggccaataataaacaaccgatggttaaaaagcgtaaggcccagcgataaccatttttaaattcggttcgaggcatgaattcatcggttttttgcgtgaattcaagggtatggcggcagatatagagtaatatcaggcccggaacggcggcggcgatggagaacagataaaatatcgaccagccgttagtttctacaaaccagcctgcaaccgggccgacatacacgcgaccaaccgcagacagtgctgacaataaggcaaactgagtggcggaaaacgacttattgcacagcgtcatcaaaagcgccacaaaggctgcggtacccatgccgccacagatgttctccagaaaaatggcgctccccatggtgaagatattcttgtctgtcaccgatagaatccaatagcccagattggaaaccgcctgcaagatgccgaaaatcatcagggcgcggaataagctgaggcgttgcataagcaaaccgccatacaaagcaccgataatcgtcgctaacagacctagggttttattgaccaggccgacgtcaccggcgttgaaacctagcccacgaatcagaaacggcgtactcaggctagcggcgaaagcatcgcccattttataaagcacgatcagcagtaaaatcagccaagcgttattacggccaaagaaatcgcgcagcggggcaacaattgcctgttccagcgttttaggtgcggcggcgggggcatccggttcaggagccatcagagtagcaaccaccccgataaccatcaaaccagccattaaccaataggttgactgccagccgagataacggtccgcaatccatagcgccaaaccgccggaaaccaacatggccagccgataacccaaaaccgaaactgcggcgccggttccccgttcttctgcactaagcaaatcggttttataggcatcaaaaacaatgtcttgagacgccgagcagaaggcgaccaataccgcaatcgctgccagccaccataaatgcttcgccggctccataaagcccattacgatgatagccactattaataatagctggctcaccagtaaccaaccgcggcgacgaccaaggaaagaaggggtgtagcggtccatcaatggggaccacaagaacttgaagacgtaagcctgaccgaccagagagaaaataccgatggttttcagatcaacttgctccaccgtcatccaggcttgcagcgtgccggacgtcagagccaaaggaagaccggaggcaaaccccagtaataaaagaatgagcgaattacgctgtgtaaacaggtttgaatagcgactggacataagaaacctacgtgctctgccccgattcagggcagagcaaagttaagcaaacaacagattaacgtgcgttttgtttgataaagctgttaacgctggtgtcttgagccatatccgcaataacgtcactgagcacggtattcactgcttcagttattttggcattggttgcggtaaatgcgccctggacattataggtagaacggtagttcttaacctgtttgttaccattttgcgcctgagctgtgatggagatatcagccttggtcgtgatgttgtagcgcagattaccttcctgcacgttggcgaacagttggttaactacgatttgcagatcaaccgggccgccggtaccaatcatatagccacgggcagtcatttgtttttccagcacttcctgcaacaggaagcgcaggtcgcgagatggcgttaataccaccaatttgccatcgcggttgactttggccagcgcggaatcctgacgctgatcggcaccgttgatactgatggtaattcccatcaaggtgggatcttgcggtggcaatacgattttcggcgtgacttcaagcgtattgctgttggtggcgcaacccgccagcatcaacgcggccagcagcgggaaaagaattttctttagcatgttcactttctcgagagttatggaatttttaataaactgagcgggatagctgcaatattattgcgacatcatagcactgccgcagatagggggaagatcccaatggtgacaaattcgccacaaatacggattttcatactggaaccctacaaataaccttttgccgtgacaatcggattatcctcaacctctggccgtttcgtcggcgttaggcgtatttaaccgagaattattgtcaaaggaatgttataaaacagccaaaaccgactaatattgctgtaagaaggtgtgcagttctctgccggtgcagtaaggagatctttatgattctgattcgcgaaaagatagaagaaaaactcagggcggcatttgaacctgttcacctggaagtgataaacgaaagctacagacacaatgtgcccgcaggctcggagagccactttaaggttgtgattgttagcgataaatttgccggtgagcgctttttaaaccgccatcgtgccatttatggcgtattgtccgaagaattagccggtgaagtccacgcgctggcattacatacctacacggtcaaagaatgggagagtctgcaagacaccttgcctgactctccatcatgccgcggtgccggaaccttggcataaatatggtatttgcctgatttccgtggaacttttctgctgatttaaggtattagtaatagagaaatccacaggcggcctttgggccgtttgttttttaactggcgacaacactatttttagcacagcgctgccagcgtttttgtcgagggatcgacgtccgcgtaaattttcgcgcgctgacattcactcgctttcctcgactcgaaacctatgcaccgctataatgtcgcgtcttatttttccggaatggtttcgggacgcttctgacatctgggatactcggttctgtaatgcggccgtcccggttcttagagggtgttttcagggccagtgtcattcctacaatggcagggttttgatagcggcttctggagttgaccgagcactgtgatttttttgaggtaacaagatgcaagtttctgttgaaaccacccaaggccttggccgccgtgtaactatcactgttgctgctgatagcattgagaaagcagtaaaaagcgagctgttgaaagcggctaaaaatgttcgcattgacggtttccgtaaaggccacgtgccgatgaacatcgttgaacagcgttacggcgcgtccgttcgtcaggatgtactgggcgatctgatgcaacgcaactttgttgacgcgatcatcaaagaaaaaatcaacccggctggcgcaccaagctacgcaccgggcgaatacaaagaaggcgaagatttcactttctctgttgaattcgaagtttatccagaagttgaactgaaagatctggaaaaaatcgaagtagagaaaccggttgttgaagttaatgacgccgacgttgatgcgatgctggacaccctgcgtaagcaacaagctacctggaaagacaccgatggcgctgctacagcagaagatcgcgtgactctggacttcaccggttctatcgacggcgaagagtttgaaggcggcaaagcaactgatttcgtactggctatgggccagaaccgcatgatcccaggctttgaagacggcgttgtgggccataaagcgggcgaagaattcactatcgacgtgaacttcccagaagattaccacgctgaaaacctgaaaggtaaatcagccaagttcgctatcgttctgaagaaagttgaagaacgtgaactgccagaactgactgaagaattcatcaaacgtttcggcgtggctgatggttctatcgaaggtctgcgcgctgaagtacgtaaaaacatggaacgcgagctgaaaggcgcagtgcgtaaccgtgttaaaactcaggcaatcgacggtttagttagcgctaacgaaatcgacgttccagttgctttgatcgacagcgaaatcgacgttctgcgtcgccaggctgcacagcgtttcggtggcaacgagaaacaagctgctgaactgccacgtgaactgttcgaagaacaagctaaacgtcgcgttgttgttggcctactgttgggcgaagtgatcagccagcacgagctgaaagctgacgaagaccgcgttaaagcgctgatcgaagaaatggcttctgcctacgaagatccgcaagaagttatcgagttctacagcaaaaacaaagagctgatgaacaacatgcgtaacgttgctctggaagaacaagcggtagaaacactgctggctaaagccaaggtaaccgaaaaaccaactaccttcagcgagctgatgaatcagaccactgcagcgtaatgttttttagcgcataacgttaagtatctttgacttggcgttttgacttctcaagcccgtcgcctttggctacgggcttttttcttcttgatttacacgataaaaacaacaaattctcggctatggttcccgtcaaactgggctatattaaaaaaataaaagaaagtgctgaattaaatccgtagcgagcgtctaaaaaacgcgtgaggtgagaaaggggcgttgagacaataaaaggtatggggcttgaaaaacagtatccttcccccaattactattacagactttatgttctatctttccttgcgttggctgattatcaccgctggatatgtctgggacgacctactgcttatcatggtcatcattgcttatctcaagtagaatcggttattaatggcgccaaagtaaattctattaggagatggtaatgtcatacagtggcgaacgagatcaatttgcacctaacatggctctggtgccgatggtgattgagcagacttcacgtggggaacgttcttacgatatcttctcccgtctgctgaaagagcgcattatcttcctaaccggccaggttgaagatcacatggccaacctgattacggcacaaatgctgtttttggaagccgaaaacccggaaaaagatatcttcctttatattaactcaccgggcggggtgatcactgcgggtatgtctatctatgacaccatgcagttcatcaaaccggatgtcagcaccatttgtatgggccaggcatgttccatgggcgcattcttgctgaccgctggtgcgaaagggaagcgtttctgtctgccaaactcgcgggtgatgattcaccagccgctgggcggattccaggggcaagcgaccgacatcgagattcatgcgaaagaaatcctgaaagtgaaatcccgtatgaacgaactgatggcgaaacatacggggaaacctctcgaagaaatagagagagacacggagcgtgaccgtttcctgtctgcggccgaggctgtagaatatggattggtcgatgagatattcaaccgccgtgactaacagcgtatttctgtgcgccgatagactataattggaaaagtttagtcttttagcacgctaaggtgccggcagtccgtttgataaagacgtgacgtccagaagtaacgagaatagtctccctgccgtcctgttgttagtgacggcagatactaaagaagaggtttactgatgacagataagcgcaaagacggttcaggaaagctgctgtattgctctttctgcggcaaaagccagcatgaagtgcgtaagctgattgccgggccgtcagtgtatatctgcgatgaatgtgtcgatttgtgcaacgacattattcgcgaagagattaaagaggtcgccccgcatcgggagcgtagctcattgccaacaccgcatgaaatccgtcgccatctggatgattatgtcatcgggcaggaaccagcgaaaaaagtgttggcggttgcggtttataaccattacaagcgtctgcgtaacggtgataccagcaacggcattgagctgggcaaaagtaacattttgctaatcggtccaacgggtagcggtaaaacactgttggcggaaacgctggctcgtttcctggatgtgccattcaccatggccgatgcgacgacgctaaccgaagccggttacgtgggtgaagacgtcgaaaacatcatccagaaactgttgcagaaatgcgattacgatgtgcagaaagcgcagcgcggtattgtctatatcgatgaaattgataagatttctcgtaaatcggacaacccgtcaattacccgtgacgtatcaggtgaaggcgtacagcaagccttgctgaaactgatcgaaggtactattgctgccgtaccgccacagggtggacgcaaacatccgcagcaggagttcctgcaggttgatacctcgaagattctgtttatctgtggcggcgcatttgctggtctggataaagttatcgggcagcgtctgaataccggtaccggtattggttttggcgcaacggtaaaaggaaaatccgagaaagcaaccgaaggcgaattgctaagacaggctgagccagaagatttgatcaagttcgggttaattcctgaattcattggtcgtttgcccgttgttgctaccttgagtgaattgagcgaagacgccctgattcagattctgaaagagccgaaaaacgccctgaccaagcagtatcaggcgttgttcaatctggaaggcgttgagctggaattccgcgatgaagctctgacggcgattgctaaaaaggcaatggcgcgtaaaaccggtgctcgtggcctgcgttctatcgtagaagcggctttactggacaccatgtacgatctgccatctttggaaagtgtggataaagtggttgttgatgaatcagttatcgccggtcaatctgcaccgctgctgatttacggccagcctgaagcgcaagcttctggcgaataattagccaaataatccagacagttagtaagataatgggggattttatcccccatttctttttcctcgcattgttatcgttgaatgtaagacattcgtccccatatactcaataacctatttagtgaaactcgtgacctcccgtgtttcacgagatttcctgaaatctggcggaagctaaacataagagagagctctatgaaccctgagcgttccgaacgcatagaaatccctgtattgcctctgcgcgatgtagtggtttacccgcatatggtgatcccactgtttgttggccgggagaagtcgattcggtgcctggaagctgcaatggaacatgataaaaaaatcatgttggttgcacagaaagaagcgtcgacggatgagcctggtatcaacgatctgttttctgttggcaccgttgcctctattttgcaaatgctgaaattgcctgatggcacagtcaaagtactggtcgaagggttacagcgtgtgcgcattaccactctgtctgacagcggagagcatttcgctgcccaggccgaatacctggaatcacctgcaatcgatgagcgtgagcaggaagtactggtgcgcacggcaattaatcagtttgaaggctatatcaaactgaataaaaaaatcccaccggaagtcctgacctccctgcatagcattgaagacgctgcacgtctggcggataccattgctgcacatatgccattgaaattgaatgataaacaagcagtgttggaaatgttcgacattaccgaacgtcttgaatatctgatggcaatgatggagtcggaaatcgatctgttacaggttgagaagcgtatccgtaaccgcgttaaaaagcagatggaaaagagccagcgtgagtactatctgaatgagcaaatgaaagctattcagaaagaactgggtgaaatggacgatgcgccggatgaacacgaagcgctgaaacgcaaaatcgaagcggcgaaaatgccgaaagacgcgcgtgaaaaaaccgaagctgagctgcaaaaactgaaaatgatgtcgccgatgtctgcggaagctaccgtagtgcgcggttatatcgattggatgttgcaggttccgtggaacagccgtagcaaagttaaaaaagacttggtcaaggcgcaggaagtgttggataccgaccattatggtttggagcgcgtgaaagaccgcatccttgagtatcttgcggttcagagccgagtcagcaaaatcaaaggcccaatcctttgcctggtagggcctccgggcgtgggtaaaacctctctggggcaatctattgccaaagcgaccgggcgtcagtacgtccgtatggcgttgggcggcgtgcgtgacgaagcggaaattcgtggccaccgtcgtacctatatcggttctatgccaggtaaattgatccagaaaatggcgaaggtgggtgtgaaaaacccactcttcctgttggatgagatcgataaaatggcgtccgatatgcgcggcgatccggcgtcagcgttgctggaggtgctggatccagagcaaaacgtggcgtttaacgaccactatctggaagtggactacgatttgtccgatgtgatgtttgtggcgacctccaactccatgaatatcccagcaccgttgctggatcgtatggaagtgattcgtctgtctggttataccgaagatgaaaaactcaacattgctaaacagcacctgctaccaaaacagttcgagcgtaatgccattaagaaaggcgagctgactattgatgacagcgcgattattagcattatccgttattacacccgcgaagctggggtacgtagtctggaacgtgaaatttccaaactgtgccgcaaagcagtaaaaaatctgctaatggataaaacggttaaacacatcgaaatcaacggggataacctgaaggatttcttgggtgttcagaaggttgactatggtcgcgccgatactgaaaaccgcgttggtcaggtaacgggtctggcatggaccgaagtgggtggcgatctgctgactattgaaaccgcctgtgttccgggtaaaggcaaattgacctataccggctctctgggtgaagtcatgcaggaatccattcaggctgcgctgacagtcgttcgtgctcgtgcggataaattggggattaaccctgatttctacgaaaaacgtgatattcacgttcacgtacctgaaggcgctacgccgaaagatggcccaagtgcaggtatcgcaatgtgtactgcgttggtctcctgcctgacgggtaaccctgtgcgcgccgacgtcgccatgacgggtgaaattacgctgcgtggtttggtattgcctatcggtggattgaaagaaaaactgctggcagctcatcgtggtggtatcaaagtggtactgatcccagatgagaacaaacgtgatttggaagagattccagacaacgttatcgccgatctggagattcatccggttaagcgcattgatgatgttttagccattgcgttgcaaaatccggcctttggcgcacagcctgttgcgtcaaaatagtgacggatagcaagaagtattgataaaactaatgctggtaagcgaaatcctacttgccagctattttttgtgccgctaagttagatcggctgtctgacgaaagcattcgcctttaggttgcttgccaaggctagacaggattgatataacagctgcgctgtcgtgttgtccgtagggattttcggcgcgacgatagaattctaaaggggatgaaagagtgaataagtcacaactgatcgacaaaattgccgcaggtgctgatatttctaaagcggccgctgggcgcgcgttagatgcaattattgcttctgttactgaatccttgaaagaaggggatgatgtagctctggttggtttcggtacttttgcagtacgtgagcgctctgcccgtactggccgtaaccctcagaccggtaaagaaatcagtattccagctgcaaaagtaccaggcttccgtgctggtaaaggcctgaaagacgcagttaactgatgactacctcagatctcttcggtgccaaatattgtttgtgataaacaataacctgacgcagttgagttggtaaggtaagatataaggcgcatcgtaactgatgcgcttttttttcgcttggcagttgaactggcgtaaaatgctgacttagccgtaaggcaatggcggcgttggccactgtgagaagttttatcgcgcagcaacgattttgggctgacgcaaggaacgctgggtcttcatacctgagcaagagtttttatccacattacagcggagtattgtcacattatgatggacaatttacgcgcggctgcaaataacgtcgtgctcaaaatcatcctggccctgattatgttgtcctttatcctgaccggcgtgggcggctatctgatcggtggctccaacgactatgcagctaaggttaatggccaagagataagccgtgcccagcttgaacaggcaatgcaaagtgaacgtagtcgtttacagcaacagctaggcgagcagttctccgtgctggctggtaatgaaggttatatgcagcagctgcgtcagcaggtgttggggcaactggtcaacaacatgttgctcgaccaatatgctaaacaactcggcctgactgccagtgtcgatcaggtaaaagaatctattcgccagattccttatttccagactaacggtcagttcgataacagcaaatatctcgagctagtaaaccgtatgggctacagcctcgatcagttcgcgcaggtacaacgtcagcagttgattaatcagcaattgctacaggcctttaacgacagcggttttgcactgccggcagaagctaccgctatgtccgagctgattttgcaacagcgtgaagtgcgactggcaaccttggatctgaaagcgttacaggctcagcagaaagtcactgatgaagagctgaaagcctattacgatcagaacaaaaacagctttatcgcgcctgaagagatgaaagtgagtttcatcgccatggatgcggcagcgatgcaagatacaatcaccgtgactgaagaagatattgctgcttattacgatcagcacaaatccagttttactcagccggagcgcagaaattacagcgttattcaatttaaaaccgaggcagatgccaaggctgctttggatgaactgaaaaaaggtgctgatttcgctacgttggcgaaagaaaaatccaccgacattatttctcgtaaaaatggcggtgaactgggttggttagaacctgagacaaccgccgatgagctgaaagaagcgaatctgaccgaaaaaggccagctgtctggcgtggtgaagtcttctgtgggttatttgatcgttcgcttgaacgacgtcaagccagagcaggttaagccgctgtctgaagtgcatgattcgctggcagccaaagttaagcaggaaaaagcggttgatgcttattatgcgttgcagcagaaagtgagcgaggcggcaaccagtgataatgagtctctggcttcagctgaagaagctgctggtgccaaagcgaagcaaaccggttggtttactcgtgattctgtacctgccgaagtgaatttcaaacccgtagttcaggctatctttgatggcgctttggttggtgagaatggtgctcctggcagtaactctgatgtcattaccgttgatggcgatcgcgcattcgtgattcgtatcgatggtcataaaccagaaggcgtacagccatttgatcaggtacgcgatcaggttgctgaactggttaaacgccagaaagcagagcagcaggctcgcgttgacggtgaaaaaattctggctgcgctgaagcaagataaaggcgaagaagcgatgaaagccgctggtctgagctttggcgagaagaagtccatcgctcgtgcgccggatgacgatcagttagttcaaaccgtatttgcgctgcctcatccgcaggcggacaaaccggtttacggtttatctcaggatcgtcaggacaatattgtattgatcgaattgctttccgtgacgccgggtaaattaccagagggtgaaatggcaaacttcattgctaaaatggaagagggtatcggcggggtgactctggatgcgctgatggctaacttgcacaaacaggcaacgattaaaatgggtgctgcggaacaacaacagccgcagtaaacatcgcaaacctctgcaaaccgatgtaacaatgaaaggccgctttagcggcctttcgcatatctggaatccgtgatttgccgaaaaaaaacgcttgaggcaaggtacagatgctgtcaaatacatggaggatacagcatgaaaaataatggaaaatccttagcactggcattgctactggcctggttatcagctccggtaacgctagcggctcctaatcaaacgaaagaatccgtgcaaaccaactcatcaaaagcatcggctcaaacctcagagaagtcgtggaataggtcgaaagaaaataacttgaaagctgacggagcaaacaccaataagccttcagccgggaaaaatgagacagaagacggactgataaatgttaataaagccacggcagaagagctggctgctgcgctgagcggtattggtttgaaaaaagcccaggccattgttcgctatcgagaggaatttggcttctttagtcaaatagagcaactgcaagaggtttcaggtattgggccgatatttattgagcgcaatcggcagaaaataaaaatgtaagttgaatgatatttaatcatttagttagtggtttataacattggctgctaacctttcatcaggtcataccagttctgtggcgtatgtatttgaaaaattcataaatgatgaaaggggcgttgattagcatgcatcatgaagttttggttagaagctatcatgttgatggttatttacatgtcaataattcacgttatttggagttctttgaggaggggcgctggcgttggcttgatcgagagaatcggctggaatggttgaaagaacggaatattggtttctatatggtaaatatcaatattaattatcgtaaaggggccgttgagggagatctgctacgaattgagagtctggtgtattccctggaagggcgctgcgggaaattcaagcaggtcatgaaaaggttatcggacggcgcggttatcgcagacgctgatatgacgtttgtctgcatagatatgggaatacaaaaagcgctgcctatggaaggggagttaaaacacaaattggaattattaggtaactaacttattggtatattttttactatagctgagctaatggggtgcgttcagttcagctattttattctgcaatagtggagttggtgtaaggctgttcgcagagagcgaaaatgtaaataattggttaactaactgtgatctaaatctaagttatatagtgagtctgctatgtgcttgggtggctctgctattatcgatgaggtcataccagtttggtttacagttctggcagatgcttacctgcattcgattttatcccgtagctgaggttttctatgcgcacccatataacagttcgtggttttcatattgacgtttatcagcatgttaataatgcccgttatcttgagtttcttgagcaagcgcgctgggaatggctggatggggaggaagcatttcagtggatgacccgcaaccatatcgcttttatcgtggtgaacgtcaatattagttaccgtaaacccgcggtgttaggtgatgtgctacgcatagatagccatttggtaaaactcagtggtaaaagcggggtgcttaatcagattgtgaccttagagtccgatggttcgctggtggctgatgccgcactgacttttgtttgtattgatctgagaacacaaaaagctgtgccaatagacggcgagcttcgggaaagattgagtgcgttagaagagccgacgcaagggcagtagtcgtcctgatgagcaatggtgctttaattagcttactttgaaaatcgttgcggctatttgggttcagtttgttcgaataatattttgcattgctctatagctctatagctctatagctctatagcaagcagcctgtgaatttatgtatcacagactgcataggcctgtttaggttgaaccgattagggctgaaccaaactggggaaactgaaattaaagtagaccgattttctttttaaggctggtcgtgacagcagacttattagttaggtaattattcagcccattagcccgtaagtggcaggctgcacattcgccgcagccatcgcctttaatgccgttatagcaggtcagcgtgtggtggcgaataaggtctagctgttggtaataatcggctaatgcccaggtctcagctttgtctagccacattagcggagtgatgaaagcgatatcccgcgcgatgccgagattaatggcatggttgagggctttaacaaattcatcgcggcaatctgggtagccagagaaatccgtttcgcatacaccggtaatgaccgcttctgcttgtacctgataagcgtagattgccgccagagtcagaaacaggatattgcggccgggaacgaaggtgctgggaatggcattttcgctgctttcttcataagtcggcacgggaatactgtcgcgagttaggctactgaccgccagctcgtttagcatgcagacatccagcactttgtgcgctttggcgcctaattgaatgacaagttcgcgggctacgtcgatctcttcacgatggcgctgaccataatcaaaggtcacacagtgaacttcatcatattgctgcaatgcctgaatcagacaggtggtggagtcctgcccaccgctaaatactacgactgcgcgtttcattaatcgctccctcgtaggcttaaggtcgatataacaataaccttgagccggaaattaaatactgtggctatgttaactcagttagctggctaaaaggtaataacaggccgaattgaatcagtgaagccattgataattactgtatctgcaataagcgctatccaaggatagttcgctttaattatccaatatggcgttatccagcgatgactctggggtagggggcaaccaggcctgacaaaaatcaaaccaaccgtaggcggtgagcgtaacgcctttgattctcggtggcgcactaacctgatattgataatttaatagcggcagaaccaacccggtggacatcagctgtagatagtgttcccgcaataatgcataacgttcacttggtgctttaacctgttgaatttgcagtaatgactgctgttgccaaagcagtaagtctgccggaagaataccctgccataaaaaatcatggcgtaaccaactttccatggtggcttcgcgggattctccaacaagatggtctgacattaagaggtctgcttgttcacattggttaacgctttgccagtgtttgttggcgcaaaattgaacttcaagctcgcagccgtgttcggcgagtaattttttcaactcgctggcaaccatggtcaactctgctggttgctggtagagcaaaattagccgtttaggtagcgtgatgcttttatcttctgggaaccgagggataggccagccgggcaacatttcttcgctgggaatgataattcccctttgaatggataaatttgccaaaaaaccggatgcctgaatcagcatcatcatttttctggcttgctgggaattgagctggcctcgtttcaggttcatggctaaatagcaaaaacctaggctggtactgcgttgaacaggttttgccaagggcatatcttcgctttgcccaatggtgatgctgaccggatgctggctgctgccgttaaccacaacatccggaggctgtggggagatccagtattcgatactgtcgagatagggatgctgcaaatgataaaactcatgttgttcgagccttatcaagtgtttttcaaagtcggctactttaaacggcccggcgcctaccgatggagagtcagggtgaaacaaacgatagggcaaatcggccatacggtgagccaaccagtaatcgggatattcaagggtaaactggacgcataacgcatgcggcagagttatagatttaacattttccagccccggctgaccgcgaggatggtgacgcagtatatggaaggtttccagtaactgtgctccgctaatgggatcgccattatgccagcgaagctggctgcgtaagaaaaattgccaggttaggccatcatcactaatgtgccagtgatgggccagatcgggctttggcagaggatcaccggtctgaaagcgggtcagacccgcatgtagcgtatatatcaaatgctgttccgcgcgcccgttggtttctagcggaattagcggttccagctctcgataataaggaattcgtagcaccgggctatccgcttgccattgcccgcccatatgtgggctaagtaatgcatgcagacgctggggttccaactgggctaattgaaatgcaccctgatgatccccttgttgtaataactggcgtagataggttgctcgcaattcatccggtgttttcaggcagtgaattcgtgctcgtttgcctctgccaacttgcgcatcccaactgagccagccctgttcctcaaatttttggataagggttctggtatgccgatcgctacaaaaaaacagcttggctaattcactaaccgtcgtgttaccagcctgctggccaaattcttgatataaacgctgatattgagccaatcggtgaaatatgcgcatagttaaatccggaagggtttgtattaattgttcactattagttccctaaatactacgccatacttttgtcactgccagcaggctcacaattttatgaggtaagtatgtaccgcttagccgctttcgatatggatggaactttattaatgcgtaaccatcagatcggtgaggcgactttggaagcgctgcatcaattgcaccagcgacagataatggtcacttttgctaccggacgtcattacctcgatatgaaagggattttatccagtttaggaattaaaggttatctgattaccggtaatggaacccgtattcatgatattgacggcaataaattgcagggtacagatttacccgcggaattagtgcagttcgttctgggaacaacctggtctaccaacgccagcatgcatatttttcgcgatgaaggctggtttaccaatcgtgacgatccggcgcagttaacggcgcataaactgagcgggtttaaataccaactcactgaatttaatcagttacctttggcaggaacacataaaatctgtttctgcgcgcctcacgaagagctgttaccgctgaaagacaggttagctgcgcggatggggcaagaggtggatttgtgtttttctgccagggactgtctggaagttttacctcgtcactgtaataaaggtgctgctctggcttcgttgacagaactattgggtgttgaaatggtcgattgcatggcatttggcgatgcaatgaatgataaagaaatgcttgatcaggttgggcgcggaatggtaatgggtaacgcattgcctcagcttaaatcagcattgccgcagcttcaggttattggccattgtgaacaacaggccgtagctcactatttgcaacattggctaagttcaccacacctcacctattcccccgaattctgaggtgattgctattagccagccggatatttatccggcttttttttttgcttattatcgaccaactttaaataaattggccgatgaactggatgattaaaggttttccaactccgccttaaaactggttaaatccccaatgttagcgctcacccattcagggttgtaataagtatccagatagcgttctccgctgtcgcagagcagagtgacaatagctcctgactcgcctttttcacgcatttgtcgggctaactgtaaagcaccccatacgttagtgccggtggaggcgcccactttacgacccaaaacgccttctaaccaatgtgccgtagcaacgctggccgcgtcgggaacgcgtagcatgctatcgatcacctcaggaataaaagagggttcggcgcgcgggcggccaatcccttcgatgcggctgccgcaggtgccggttacgctgcgatcccgattgcagaagcaatcgtaaaagaccgaattttccggatcgactaccatcaattgagtattatgcccctgataacgaatataacggcccagcgtcgccgaagtgccaccggtaccagcgctcatcacaatgtaattgggaacggtaaagggttcgcgggccatctggcgatagatactatcggcaatattattatttccgcgccaatcggtagctcgctcagcgtaggtgaattggtccatataatggccgtttaattcttttgccaactgctcggacgcggcataaatttgccccgcatgatcgacaaagtggcagcgaccaccgtaaaaggcaatttgttcgacttttttgcgcgcggtgcagcttggcataactgcaataaacggcaacccaatcaggcgggcaaagtaagcttcagaaaccgcagtgctgccggaagaggcctcaataatagttgtcccttcctttatccagccgttacacaggccgtaaagaaacagagagcgcgccagccggtgtttcagacttccggttggatgggtgctttcgtctttcagatacaggtaaatgccaggaaactcaggcaaatttaagcgaattaagtgtgtatcagctgagcgttgaaaatccgcctctatttcactgatggcgttttttacccaagtattggtcatgtagtggcctgcgatgtcgggggtatcaaattatgactaggttaacggtattttgggaaaaaattgttgccatttttacttctttatctcctaatgagagaaatttattctctggagtggcgatatgttagataaaacagaccgaaaactactgcgtatgttgcaggaggattgcacgctctctcttcaggttttggcagaggcagtcaatctgacgtcaacgccttgctggaaaaggctaaagcgtctggaggatgaaggttatatccgtggccgggtggcgctcttggatagcgaaaaactggggctgggattaacggctttcgtactgataaaaacccaacagcataatagcggctggtatcaggagtttgtgcaattcactaagcagatgccggaggtactggctttctaccgtatggccggagaatatgactatctgatgcaggtcgaagttgcggatatgaaaagctacgatagtttctataagcgtatggtgaatggtgttccggggttgatagatgtaacttccagcttcgcaatggagaaaattaagtacacaacggtactaccggttcctgagtgaataattcactaaataacaactttatcgatgttattctatgccgcatgagccgtggcgagagagtctgacattattcgattcgcctccatactatttcccttcatatcatggaataaaactgcgtgagattgtttgctcaactaggctggtactttcgtcgcgaatggcgtcgctatttgggtgcggtagtactgctgatcattatcgccattttacagctgttgccacccaaactggttggggtcatcgtggatggtatgacggaaaaaaccatgtccgccaatatgttgtggacatggattggcgtaatggtagtgaccgcgataatagtgtatctgctacgctacgtctggcgcgtattactcttcggcgcatcctatcaattagcggtggaattacgctctaatttctaccgtcagcttagccggcagaatcctggtttttacttgcgtcaccgcacaggcgatctgatggctcgcgccaccaatgatgtcgatcgagtggttttcgccgccggtgaaggggtattgacgctggtggactcattggtgatgggctgtgcggtgctgattgtgatgagcacacaaatcagctggcagctgacgctgctgtcgttgttaccgatgccgataatggcgattgtaatcaattatttcggtgatttattgcaccaacgttttaaatctgcgcaaggggctttctcggcgttaaataatcaggcgcaagagagcctgaccagcattcgcatgattaaggcatttggccttgaaaatcatcagtctgagcagttttcccgtgtagcaaccgaggccggtgcgaaaaatatgcacgtagccaaggttgatgcctgttttgatcctacgatttatatcgctatcggcgtagccaatttactggccatcggtggcggtagctggatggttgtgaatggcagcattacgttagggcaattaaccagttttattatgtatttagggttgatgatttggccaatgctggcgctggcgtggatgtttaatatcgttgagcgtggcagtgccgcttacggccgtatccgtagtttgttggaagaggctccggttgttgtcgatggacaaacgccattacaggcggaacgcagtactttgacgattgatattcgccgctttgattatcccggaagtgataagcccgctttacaagacgtcaagctgaagctggagccaggagagatgctggggctatgcggcccaaccggttcggggaaaagtaccttgctggccttgattcaacgacagtttgatatagacgaaggtgacatttgctatcaggggcaacctctgacggctattcgtttggacgattggcgtagccgcctgtcggtggtcagccaaacgccatttttattctcggataccgttgcaggcaatattgcattgggtaagcctgacgccacgcagcaggaaattgaacaagcggctcgtttagccagcgttcacgaagatattctgcggttaccacagggatacgaaaccgaagtgggagagcggggcgtgatgctttccggtggacaaaagcagcgtatttctattgctcgcgccctgttgcttaatagcgaaatattgattctggacgatgctctgtcggcggttgatgggcagacggagcatcaaatcctgaagaacctgcgtcagtggggagcacatcgcaccgttattattagcgctcatcgtctctctgcattgactgaggcaaatgaaattctggtcatgcaacaggggggcgtggtgcagcgtggcgatcatgagcagttactgaatcagtcgggatggtatcgggaaatgtatcgttatcagcaaattgaagcagctttagatagcgatgaagggctggaggtcgtatccgatgagtaaagctcgacaactttggccgacgttaaaacgtctgctggcttatggttcagcctacaaaagacccttgtctatcgcgatagtcatgctgtggattgcggcagcggcggaggtaagtggcccactgctgatcagctatttcatcgataatatggtcgcaaaaggcaatttgcccttggctgtagtgagtggcttggcgctggcctatttgctgctgcaactcttggcggcggcgctgcattattttcagacgattctgtttaaccgggctgccgtgggtgtggtgcaacagttgcgtattgaagtcatggatgccgcactacgccagccgcttagcgcatttgatactcagccggtcggtcaattaatttctcgcgttactaacgataccgaagtcattaaagatttatatgtgatggtggtttctaccgtgctgaaaagtgcggcgttaattggcgcgatgctggtggcgatgtttagcctcgattggcgtatggcgtggattgccatctgtatttttccggcggttttggtggtcatggcgctttatcaacgctacagcacgccggtggtacggcgagtacgcgcctatctggcagatattaacgatggttttaacgaagttatcaacggcatgggggtcattcagcaattccgccagcaggttcgttttggcgagcgaatgtctgccgttaatcgggcgcactatagggcgcgaatgcaaactctgcgtctagaaggcttcctgctacggccattactcagcttgttttcggcattggtactttgcgggctgttgttactgtttgggttgagcccagaaggctcggtgggtgtgggggtactgtacgcgtttattaactaccttggtcgcctgaatgaacctttaatcgagctaacttctcagcaatcaatcatgcagcaggcggtggtggctggggaacgtatattcgaactgatggatcgcgctcagcaaggttacggtcaggataataatccactgaccagcggtcatatccggatgcgggacgtttccttctcttatcgttcggataaaacagtgctaaaccacatcaatctggatgtgccgtcgcgaggctttgtcgcattggtcgggcataccggcagtgggaaaagtacgctagccaacttgctgatgggctattacccggtacagcagggagagattctgctggatgggcgcccgcttgacacactctctcatcaagtgctgcgacagggtgtctccatggtgcagcaagatccggtggtgttggctgattctttctttgccaatattacactggggcgtgatatcagtgaggaacaggtttggcagacgctggaaaccgttcaactggcacctttggtccgcgccttgccggaaggattacacactcgtttgggggagcagggcaatacgctgtcggttggacaaaaacagctactggctatggctcgtgtattggtacaaacgccgcaaattctgattctggacgaggcaacggccaatattgactccggcacggaacaggctattcagaaagctttgcacttaatccgaaaaaataccacgctggtggtgattgctcatcgtttgtcgaccattgtggatgccgacagtattttagttctgcatcgtggacaagcggtggagcaaggcaagcatcaggaactccttgcgcaacagggccgctattatcaaatgtatcaattgcagttagttagcgaagaactggagaccgtcgaaccggaagaagccgctattagctagctcagattgtcagggggagctttccccctgaaattcaattcatgcccgcttattttcttccccgcactaaaatctggcgtcttgcgccgccttgttcgtggaaatgcacttttgtgacgcgtgtggcactattttggtgcacaaaaaacgtactgctcgctgctgcggtgagattcacacctatactgaagtcgataatccatcctcaagcctctttttatcaataaattcttcgctagtttatttatggcacatcctttgctttatccctgatgcggcagacgttattcggacttaattcgagaaggggcaaatatgaagctggttaccgtggtaataaaaccattcaaacttgaggatgtgcgcgaagccttatcctccataggtattcaggggctgaccgtaaccgaagtgaaaggatttggtcgccagaaaggacatgctgaactttatcgtggggctgaatatagcgttaatttcctgcccaaagtcaaaatagacattgctattgccgatgatcaattggatgaagtcattgatgtcatcagcaaagcggcctacaccggcaagatcggtgatggcaaaattttcgttgccgaattgcaacgggttattcgcattcgtaccggtgaaacagacgaagcagcgctctgattctaggctcaaatttagtgattagggatgggttgataatgaaaaaacgtttatccgtgtggggcctgagcgcagcagccatgttgccttcgatggctatggccgccgcgcctgcggtcgctgataaagccgataacgcctttatgatgatctgcactgcgttggtgttgttcatgactatcccaggcatcgctttgttttacggtggcttgattcgttcgaaaaacgtgctgtcgctaatgacacaggtgatggtcactttcgctctggtctgcgtactgtggattatctacggctacagtctggctttcggcacaggtaacgcattcttcggtggtttcgaaatggcaatgctgaaaggcattggcttgaccaacctgagcggcactttctatcaattgattcacgttgcgtttcaggcttcattcgcctgtattaccgtggcgttgattgtcggtgcctttgctgaacgtatccgcttctctgcggtgctcattttcactctgatctggctgactttctcttatttacctatggcgcatatggtgtggggcggcggttttctggcacaggatggcgcgctggactttgccggtggcaccgtggtgcatattaacgccgcggtagccggtttggtcggtgcctatatgctgggtaaacgagcaggctttgggaaagaagcctttaaacctcacaacttgcctatggtctttaccggtaccgctattctgtatatcggctggtttggctttaacgcaggttctgccagttcagcgaatgaaattgccgcattggcctttattaataccgtggtggccacagctggcgctattttatcctgggtatttgccgagtggattttacgtgggaaaccatcgttgctcggcgcttgttccggctgtatcgcgggtctggttgctattacgccggctgcgggcaccgtgggcgttggtggcgcgctgattattggtttagtcggtggcgttgctgggttgtggggcgttgtattactgaagaaatggctacgtgttgatgatacttgtgatgtatttggcgtacacggcgtctgcggtatcgtaggttgcatacttaccggcgtgtttaccgcatcttcactgggaggcaccggttatgcggctggtgtcaccatggggcatcaggtcggcgtacagctcttcagtattggcgtgtgtgttgtctggtctggcgttgttgcctttatcgctttcaaaattgccgatgttatcgttggcctgagagtgccagaagagcaggaacgcgaaggtttggatgttaacagccacggtgaaaatgcttataaccagtaagaatttgagttcgaaataagtaatatttagtgaaggggcgatattgatttcgcccctttgttgattaaagagattagaaagaagtaaaaccgaatgaatcagcggcacaagtacccatcagccgcgtaaacgaataaccccttcttgcaccgtagaggcgacgagcacaccctggcgattgtaaatctgaccacgaacaaagccacgagcgccggatgctgaagtactttctaccgtatacaacagccattcatccaggcggaatgggcggtggaaccacatagaatgatcgatggtagcaatctgtactcccggctcgagaaaaccgatgccatgaggctgaagagccgtcggcaagaaattaaaatcagacgcgtagcccagcaaatattggtggatatccaaatcgtccggcatctggccgttagcgcggaaccatacgtgacgcagcggttcttctttatgacctttcaacgggttatggaatttaaccggtcgcatttcaatcggctggtggccaataaacttatcccgcagtttttctggaatcaggtgcgccagatttttggcgatttccgcttccgataccaaaccttccggcggtggcacatccggcatgtcattctgatgctcaaatccctcttcaggcgtttggaatgacgcggtcataaagaagatcggtttgccattttgaatagcgctgacgcggcgtgcgctaaagctggtgccatctcgcaggttttccacatcgtaaacgataggtttgctgctgtcgccggggcgaagaaaatagctatggaaagagtgaatgtaacgatcggctggtgcggtctgtttcgcagcataaattgcctggccgacaacctgtccgccaaatacctgacgcagccctaagtcttcactttggccacgataaagaccttcttcgatcttttccagattaatcaagttgaggagcttttgcagtgcctgacccatggtgtggccctctgtgttttctttcagcatagtgtgctgaattattaggtagctcgtcaatgtattgctattaattcactatacaaactattgtttgtagagaaactaattgctaactgaatgattaggctggatgtcagaaacgccaggtagcgttttatgctataattacctgtctaggtggttgaagccacttattaagcgccggattttcgatgagtcaccggcattgggataataagaaggagacgaccctatgaaactatggcagatagttggcggcgcagcattaacggtaaccttggcgggttgcgcgaatcacggcgcagaagttcctacccagacggcagcaagcgccgcagcgacctcggccgctatcgcgcagccatcagtcagaggtaccgtaaatattcgcgaacgtgtggcattgccacctgacgcagtcattacggtaaccttgtctgatgtttctttggccgatgctccttccaaagtgattgctcagcgtgcagtgcaaaccgacggcaagcaggcaccttttactttcgtgctgccgtttaatcctgcggaaattacgcctaacgctcggattatccttagcgcggcgataactcagaatggccagttattatttatcactgataccattcaggaagtgattaaccgtggtcaggggacaaatgcggatctggtattagtaccggtaacctccgcgccaattcagactacaccttaatcacctttgagaatgacataaaagcaggatggaatagatgccaaggcgtattttcccatactgcttttatctttctgttttaattttccgctattaccaacgccaggcaaatcgtttaaggtcgatatatccttgaacttcaaaagtgacaccttccgctagtaaggctttttgctgacgcaaataatcttcgccgcttagtgagatttcaccgtggcgattgacgacacgatgccagggtaggctagtgccttccggcaggcgtttcagtactccaccgacctgtctggctgcccgtggcgagccgcacagacgcgcgatggtgccataggtggtcacctgaccataaggaatggcggataccacatgaaatacgcgctgacggaaactatcttcttcctgttccatactctgcggagctctttttaaatgaatgcgagtgcctggaattattatcatgcaatatccccggagctgcgagaaacatatttctgacggccactagccatttgttgggcaagaaaccaccagttgatgcgggttgtcttgctatttagcggggtatggtcaataatgcccaccgcttcggagtatcaggagctgtcaatggaggctctgttggttctcccgcaacactaacttgtgaactcggtcaggtccggaaggaagcagccgcagcaggcgaggtgtgtgccgggatgtagctggcagggcctccaccaattctggcctagcctaaatctctcctgtttctcatatatcgccatttacacccaacgacttatacctgactactcctacctcactacccagatgatttaatcgctttctttaggctgttgcagcgatttcaccaacgtttgctctctccccgtagttatccttttagcctgtatcgtttaaccgagacaaaggcacaatatgctcaatacattttgtatttagatatctctctttgtcatccccatagtttatcaatggcaagaatggatatttttaaaaaactacggggaaaaagcgttggggtgtttcttataagaattgaatttttagccactaaccataatacctaaaccttgaagctaaccattattgttttggataaaaggctatttttaactggatttgacaaaattagattaaaatattggcgtaaaggggtgttgtaccgggttacgtaaataaccgtacagacagaaaagagtttttacatagtttatgataaccgttaaatcattaccccattgaagccgatagggttatcggctcaacgttgttcgtcttaaccagcgctaagcgatttaccttacatacttccaaacacccataggaatcttatcatacagtttattcatagttagctcagccaggcgatgatctgcggcggagtagaataattccagttcgtcatcagatagttcatacgtatttttttcaataacacgttctaaagtgtcaattgttgtgcattttcttaaacgcatcagatagtcagttttggtcataatggaaattcttctcaatatatgaataaaatatgaataaagaaattatagggcactatcccttaatttttcatcagggtacagacgtattcccctgagaatagtctgaataatcggtcttttgttttctgccagcgacgcaattccgggtcattaattccgtaactactaaacagtgtataagtgtcgtctagatattcctccactaactcggagaggtccgcttcttccgcgtattttattttaaaactcatcacaaatgaagctatatgctcgatcaaatcatttaactgtaaatttatcgcagaagtcggatcgtttacccagccgtggtgactatcgcctaatgtggcaataccttcatcatacaaattctcacataagaatttcaactgagcaatatcatgtcgcttaggtgagtactcatccatatcatcccctccgttaacgcttaatcggtgcgataacacatagtgagtagactgataatcattatacgaacaggtaaacagccagaaagtaaataagtctgtcgtatacaaatataaatcattttttcagtcactgctctatctttattacttaatcttacaattcatcagcggtagagggtttgtcgtaatctattatatcaaagattattttttcaggatgtacaataaatgttacagcgttagtaatgtaatcttgggtgttgatatcaagacaggcgttaaaaatataccattgataacggtaagtcattgaataatcgttaagctgaatgtttttaatctcaagaatttctaatgagcctgcagcgtagcgtgcatcttcggaataatacattagcccagacgtcaggttttcttcaatcgtgctgatattatcttttattacctcactcagttgtgaaacagagctgaggcagcgggagaagtctcctcggatttccttgttcattaattgttcgcttatgggctaattaatttatttaatgtatcaaaactcaagggcagggagtgaacctgctgatacagcctgttgtccatgagatttaagtggtttttgaataattcgaataagtaatattattaatcaaataaacagcttagcaatgtagtgtaatacgtcagaagagacttaatattgtttaatcttgacgagtgagagtcatggcttcctaatatttcccgattattgcactgtgagtagaagaaaaatttaagactaaattcatctgttgagcggttaatgtgaagggaagcccatgatggagggacgcagccttacacatgggcaactaaagatcattcgatattgctatcattacccttccgaatacgaaacagtatagctggctaacccggtgtcatttggtaaagataatttaatttactgttacgaattattttaaattaaattagatgccatttacagtttaaaccataattttttgcctgctattgccataggcctcccactctagactcttctccctgattctcctttctccgcgttatctcactctttgttacctaaattatgcatcaatatcatcttgagtattgaatctgacaacttgatgtgatgttatattgtatcaataatgactcactgatatcttcctatgtgccaatcccatcaccataaagcgtcgctttctgtaccgaatcgaacgctattttcaatttcttcatggctgcgcgcgttcggcatgataaccgtgctgatcttattgtggtcagccatttattgggcgaatgcactgccatgatcactttgcaacagctacaggttggttatgggcagcagccggtcaccgctcctcttaccggctcttttgcccgcggctcgctcaccgcagtgattggcgcaaatggtgccggcaaatccaccttacttaagacattggccggattacagccagcgttaggcggcaaaatagtctttggcgacaagaagattcccagaatggcttatttaccgcagcaagccgaattggatcgccaattccctattatcgtgttcgatgtagtagcaatgggatgctggccacaaagtgggatgtttggtggcctgaatcgacaatcggtacaacgcatcaagcaggctttggacaccgtcggcatgctggatatggccagatgtccggttggggtgttatccggcgggcagttgcagcgggtacttttcgcccggttgttggtacagcaggctcctttattactgctcgatgagccttttaccggcattgataatcagactctctgcttgctattaaacgttatccagcagctccatcaggaagggcgaaccattattgccgttttgcatgatatgtcgatggtagcgcagcattttccacgagtattacagctcaccgctgaatattgtcgctgggatgaatctaaacgcttgtttgccgagtgcgctgaagcaggccgaaacctttccaatcaaaataatctgtctgtggaagcccagccatgaatttgtttcatctattagccgacccttttgtcgatttcggttttatgcgacgagcgttggtggcttgtctggctttgtctttgagcgccgcgccgcttggcgtttttctattgctacgacgaatgagtctggtgggggatgcgctttcccacgcggtattacccggtgcggctattggctacctgatttctggcgtatcgctggttgcgatgggcatcggtggatttatcgctggactggcggtggccatgctatcagggctagtcagccgtaaaacaccgttaaaagaggacgccagtttcgccggtttttatttgggttctctagcacttggcgtcactttggtttcattacgcggctccagcatggatttattgcatgtgttattcggttcgattctggctattgattccgccgcgatgaccatggtgggcgctatcgcgaccctttcgctgttagtactggcgttgatttatcgagccctggtgattgaatcattcgaccctgtctttctgcgcgtcagtatggggcgttggctgatggtggtgcatggcatttttcttgctttggtcgtggtcaatctggtcgccggtttccagattttaggcaccttgatgtcggtagggttgatgatgttacctgcggccagtgcgcgtttttgggccaaggatttacctcatactttagctttttcggtgctgatcggcatgatttccagcgttgtaggcttgatttggtcttactacgcttcactgcccgccgggccggctattgtgcttagcgccagtattattttctttatttcgattttgtttggctcgcgcggcggcatttgggccgtggcgcgggattagaagtgtgtgctttaaaggagaattaaatgaagcgtttacctatcgcgttggcggtcgctgccctgctgtccagcccgctggctatggccaaaactatcgaagccgtcgccagtttttctattctaggagatattgtgcagcaaatcggtggtgagcatgtgaaagtcaccacgctagtggggccggacggcgatccgcacagtttttccccctcgcctaaagatagcaaacagatttctcaggctgacgtggtatttgtcagcgggctgggtctggaaggttggttgaatcgtcttattgcggcctctggctataaagggccggtggtgacgctttcagagggtattcattcacggaaaatggaggaggaggggaaaaaagtgaccgaccctcacgcctggaacagtatgcaaaatggtattcaatatgccacgcatgtgatgaatgctttaatcgttgccgatcctgaggacgcggattattaccgtaaacatggtgcagaatatatccagaaattggaaaaactggatgcctatgctaaagcccagtttgccagtattcccgttgaaaaacgcaaagtactgaccagccatgatgcttttggttattttggacaggaatatggcgtcacctttttggcacccgttggtttttccactgaagccgaggccagcgccagcgacgtggccaatttgattaagcaaatcaaacaggaaaaggtaaaaacctattttattgagaatcaaaccgatccgcgtttagtgaagcagattgctgcagccagcggggcggaggccggaggcgaattgtttcctgaagcgctatctcagaaaactggcccggcagctacctatgcggaagcgttcaaacataatgtcgatactatcgtcgccagtatgaaataactattttcccctgtctgcaacgggcaggggggcgacaacacttctaaaagcacggcatagtgagttttacggtaaagaaaaagccccgttgggcagcaacgaggctttttatctacaggcaacaagcaaaatacaagttggtaaatcggacttaacgtttctttttagttcctccctgaaccgctttgaagcgcggattgcttttacaaataacaaagactcgtccgtggcgacggacaatcttgcagtctggatgacggttttttgctgaacgtaatgaactaagcacttgcatgatgcattcccagatcagttattttttttgaaaaaatggccaaaacgctgctggaagcgcgcggtgctaccttctttggagaattctttttgtttccctgtgtaataaggatgggaagcggaagagatatccaaagtgacgtaaggataggtttggccttcgaattcgatcgtgcgttcggtggctatggtcgaacctacggtgaagtaaacgttggcgctggtgtcgtgaaagactacggtgcgataggtagggtgaataccggctctcataataaccttctatgtaatgttataatataacaataattatgcgccgagaaataagcggtttcaagccaaaaatgcaaacaatggaaaaatgatgatggatgaggcgatcgtcagacctgtgcttaagaaggggatcgatgaaaatttagtgaaatgccaggcaagaaaaaggccgcttgcgcggccttttacagagtgttatcgcaggttaagcattacttaacctgatgatcaaccgaatgactatgttcaatatcctcattcttcttgctgaaacggcggcgaaccaccacgaagaacactggaacaaagaagatcgccagtacggttgcggttaccatcccgcccattacgccagtacctaccgcgttctgagcgcctgaacctgcaccactgctgataaccagcggcattaccccgaggataaaggccagtgaggtcatcagaatcggacgcagacgcatacgaaccgcttccaacgtagattcgatcagccctttaccttctttctccattaagtccttggcgaactcaacgatcaagatggcgtttttggccgacaagcctatggttgtcaacaggcccacctggaagtaaacgtcgttgtttaatccacgcagagaagcggcgagtaacgccccgactacgcccagcggaaccaccagcataacggagaacggaattgaccagctctcgtatagtgcggccagacacaggaataccacaatcagtgagatggcatacagcgccggagcctggttaccagacagacgttcctgataggacataccggtccagtcatagccgataccgcttggcaatttagacgccagttgctccatcagatccatcgcttcaccggtacttttacccggtgcagcctgacccaaaatttccattgatggcaaaccgttataacgttccagacgcggtgaaccatactcccacttcgcagtagagaaggtggcaaacgacaccatttcacccgcgttgttgcggacataccacttatcgatatcgctcggtaacatacggaacggcgcatctgcctgtacgtaaactttcttcacacgaccgcggtcgataaagtcgttcacgtagctcccccccatggcggaaccgagtgtggtattgatgtcggaaatagccacgccgagggcctgtgctttttcctgatcaacttccactttgaactgaggtgtatcttctaaaccatttggacgcatgcctaccagcatgtctgaatgctgagccgccatacctaacagctggttacgtgccgcagtcagtttttcatgccccaggttaccctggtcaatcagttggaagtcaaagccggtcgcagtacctaactcgacaatcgccggtaggttaaaggcgaataccaaaccgtctttgatttgcgagaaggcgtgagatgcgcggccaacgatagccggtaccttattctcctcgccctgacgttcgtcccagtttttcaggctgacgaacgccaaaccggtattttgcccctgtccgctgaaaccgaagccgttaacggtaaagaccgagttaactacgtctttttctttgtccagatagtaatccgtcacgtggtctagcactttctgggtacgctcttgcgtagcacctgccggtagctgaaccatggtcaggaatacgccctgatcttcttccggtaggaatgatgttggcaggcgcaggaacaacacgcccataccgataacaatcgccagatagatcaccagataacggccggtactgcgcaggatattagctacgctgtcggtgtaatggtgggtgctcttttcgaacatccggttaaaccaaccgaagaaaccggttttcgggccgtgtgaacctttaggaataggtttcaacatagtggcgcacagtgccggtgtcagaatcaacgccaccagaaccgacagcaccatggcagaaacgatggtaatagagaactgacggtaaatcgcaccggtagaaccaccgaagaaggccatcgggatgaataccgcagaaagcaccatcgcgatccccaccaatgcgccctggatctgctccatggatttcttggtggcttctttcggcggtagcccttcctcttgcatcacacgttcgacgttctctactacaacgatggcgtcatccaccaatagccctatcgccaacaccatcccgaacatcgttagcgtgtttatcgaatagccaaaggcggaaagaatggcgaacgtccccaacagcaccacaggtacggcgatggttgggatcagggtagcccggaagttctgtaggaacagatacataaccaggaataccagaatgatcgcttcgaccagcgttttcaccacttcgttgatggaaatcttaacgaatggcgtggtgtcgtacgggtaaactacttttagaccggctgggaagaacggttgcagcttggccagttcggcttttactgccgccgaagtgttcagggcgttagccccggtagccagtttgataccgatacctgccgcaggtttaccgttgaaacgagcgataacgctgtagctttccgctcccaatttgacgattgcgacgtctttcaggcgaacctgagagccgtcggtgttcactttcagcaagatctggctgaattcttccgcagaggtcaaacgggtttgcgcaataatagacgagttaagctgctggcccggcactggcggtgtaccaccaagctggcctgctgccacctgattattctgcactttaatcgcattgataacgtcaaccggcgtcagcttgtagttgttcagcttgtgtggatccatccaaatacgcatcgcatattgggaaccgaacagctgaacgtcacccacgccggaggtacggctgataggatctttaatgttcgaacctacgtagtcggcgatatcttcctgctgcatggtgccatcttcggaaataaagccggcaaccattaagaagctgctgctggatttctcgacgctaacgccttgctgttgtacttcttgcggtaacagcggcatggccagttgcagtttgttctgcacctgaacctgcgcgatatccggatcggtaccttcgttaaaggtcagagtgatctgtacgctaccggacgagtcgctgctggaagacatatacagcaagccatcgatgccgttcatgttctgttcgataacctgagttaccgtattctgaactgtggtcgcatcggcgcctggatagttggcagagatcgaaattgccggtggcgcaatggtcggatattgcgctacgggcagtttcattatcgcaagtgcgcccgccaacataatgataatggcgataacccatgcgaatatggggcgatctataaagtacttagccatgaattaccggctccttttaagacttcttcgcttgttcagccggtgctgctgccggtgcggcgtcagagacttcctgcgccttcacctgcacgcccggtttgattttctgtaagccggttacaatcacgcgatcgcccggtttcaagccgtcggtaatcagccatttatcgccgattgcctgagccgcagttaccgtgcgcagttctactttgtcaccttcgcccacgaccatcgcggtggcttcaccacgcgggttacgggtaataccctgctgaggaaccagcagcgcatctgctctcacaccttcatcaagacgggcgcggacgaacattcccggtaacaatgactcgttcgggttagggaagatggcacgaatcgtaatggaacctgtggtttcatccacggttacgccggagaattccagcgtcccggtttcagaatattcagtgccgttttccaataacaggcgcactttcgctttgccgttttcctgtttcatgacgccgctggccagttctttcttcaggcgcaggaattcatcactggactgcgtcacgtccacatacattggatcgagctgctgaacggtggttaatgcggtggcctgagcgctgctaaccagagcgccttcggttaccgaagatttaccggtacgacctgaaattggcgaagttaccttggtgtaagccagattaatacgtgcgctttccagcgcagcttttgcgctttgtactgccgcattggcctgcatcaggttagaggtcgcggtatcgtaatcttgtttactgatgtagttggtgcctaacagaggtttgtaacggttaacggtcaaacgcgcaatttccgcgctggcctgtgctttggctaaatcgcctttggcgctgtcataagcggcctgataggtcgccgggtcaatttgatatagcgatgttccggcggtaacgtcactgccttcaacataattacgtttaagaataatgccactaacttgaggacgaacctcagcaatacggaaagcagacgtccgccccggaagctcagtagtaatattgagaggttgagctttcaatgtcacgataccaacttcaggggcttgttgtgcctgggcgccttgcgctgcatctttatcattacatcctataagtactaagctgcctgaaagtaccagaattgcagccagaggcattacccctctgtttttgctcatagataaacctcaagtgtccgatttttaattaaccaatggatcacaagctctaaaacccattgctgcgaaaatgatatgtgcgtgctatggtacatacattcgcaaatgtatgtaaatcacagccccccgaaaaaacaacgccatggcacgaaaaaccaaacagcaggcccttgagacccggcaacaaattcttgatgccgccgtgagagaattttctgaacatggtgtttcaggaacctcactcgcggatattgctgacgctgcgggtgttacccgtggtgctatttattggcatttcaaaaacaaggtcgatctgtttaatgaagtctggtcgttatcggaatttgacatcgatgaactcgaactagagtatcaggcaaaatatcccgataatccactgcgtatcctacgagaaatcctgatttatattctggtcgctacgaaagaagactgccgacgtcgtgctttgatggaaattgtgttccacaaatgcgaatttgtcggggagatgacctcagtccatgacgcaagaaaagtcctctatctggcaagttatgagcgaattgaagccgttttgcaagactgtatcgcagcaaaacagctacctgccgatttgaatacccgctgtgcggcgatcattatgcgcgcctatattaccggcctgatggaaaattggttatttaccccagaatgttttgatatccaacaggatgcagcggtattaattgatacctatctggaaatgatttcacggtgccaaaccctgcgaggggaaggcgcttcagcgaaataagattaacgtgaggtaaatatgagttctttggtcgttattgccaacggtgctgcctatggtcatgagtcattatttaacgcactacgcttatccattgcgctaaaagatcagcagcccgatttagatcttcggttatttctgatgtccgatgcggtaactgccgctatgaccggacaaaagccacatgagggatacaacattcagcagatgctggagattctcagcgcccagttggttcctatcaaactgtgtaaaacctgtgctgatgcgcgcggaattagcgcgttgacgcttattgaaggcattgaaattgggactttggtcgaactggcgcagtggacgctggcggcagagaaagtgttaaccttctaattctcaggctgatagggcggttttcagccccgtaggccgttttttatgcaatgaagaatttttcttatgatcggcgttggccgaacgtggtaggatttctattatctccgctgatatgaagttagatcatgattcgctggttcaatacccaatcgtctctgcttttcaataataccgacagcaataccaacagcgcacccttgcttcgtgtctggatgctttttagtctgcttattctggcgctggtgtgtttgcctgcggctaacgcggcgaacttaaatggcgacgtgccgagccgtagtgaagtacaaaatcagctcgatgttctggcgaagctgaaaactccgacgccagccgacaaactggctcagcaagatttggtgcaaacgctggaatacctcgacgccattgagcgggttaagcaggaaaccaaccagcttaagcagcaattggctcaggcaccggctaaactgcgccaggcgaccgatgcgctggaagtgctgaaaagcaactcctccgattcgctgactcgtgaatcactagcgaactattctttacgtcaattggaatcccggctaaatgaaacgctggatgacctacaggcggctcaggaagatctttccacttacaatagccaattgatttccctacaaacccaacctgaacgtgtacaaagcgccatgtatagcgcttcccagcggctacagcaaatccgtaatttactcaatggattagcgccgggacaggatggtttacgtcctacgcaacagcaaatgctgttaactgaacaggtgttgttgaatgcgcagttggacttacaacgtagaaatctggaagccaacactacgttgcaggatttactgcaaaagcagcgggattataccaatgctcatattggccaactggaacgtaacatccaaacgcttcaagaggttgtcagtggtaagcggctgattctttccgaaaaaacggctaaagaagcccaggttccggatgattctaccgacattcaaaacgatccgctggtcagccgcgaactggcgattaatcgcgatttaagccagcgtttgatcaatgccaccaaagaaggcaatacgctggttcagcaaaatattcgtgtgaaaaactggctggatcgtgcattgcagtctgaacgcaatttaaaagaacaaattaccgtattgcgaggtagcctgctgttatctcgtattttgtatcaacaacagcttagcttaccgaccgatggcctgattagcgatatggggacgcgcattgctgacctgcgtttggaacagtttgaaattaatcaacagcgggatcagctcttccagggcgatgattatattcaaaaggtgatgagcgacagtaaagaaaaagtcagtggcgaagtggaagatgcgctggggcaaattgtcgatattcgccgtgagctgttggatcaattgaataaacagttgggtaaccaactgacattggcgattaatctgcaaataaatcagcagcaattactcagcgtcaacagctcactgcaacatactttaacgcaacaaatcttttgggtgagtagcaataaaccgatggattggtcgtggttgaaaagcttgcccgaggcgattcacagtgagttgagcaatcttcatttcaaattttcccctagcgatattctggcgggattactgaaatctttgatttttgtgattccggggttgctgctggtcggcgtgattcgctggcgctataaaatcatagataaccatctggatagtctggcgaacgatgttggtcagctaaaacacgatacgcagatgcatacgccgaaggcgattttgctcattttattaaaggtattgccgggtgtggtgctgattctgcttgtaggctattggtgccttcaatcggagatggcgattagtgatttcctctggagcttcttccagcaattggccttgttctggctgatattcgatttgacctaccgcatgttgtccccaggggggattaccgaacgtcacttcaatattgccgctgagcgctgcgcgcattaccgtcggcaaatggtacgtttgggcgtagcgctgctgccggtgattttctggtcggtattgggcgagaaaagtcctctacggctggtggatgatgttatcggtcaggtggtagtggtgattgcgttagcgctgctagcggtatttgttttcccattctgtcgtgatagctggcgtgagaaaaacagccacgcggtgcgattggtgatagtgactgccattgcggtgacgccggtgattctgattggcctgatggctgcgggttatttctatactacgctgcgtctggccgggcgttggattgacagtatctatctattcttcctgtggaatatcgtttatctgaccgcgattcgaggcttaggcgttgccgcccgccgtttggcttaccgacgcgccattgctcgtcgccagagtttggcgaaagaaggggcggaagggagtgagccggtagaggagccgccgctggcgttggatcaaattaaccagcagtcattacgtttgaccacgatggtgctgttcctgatttttgctacggcgttttactggatatggtcggatttagtcacggttatctcctatctggacagtatcactctgtggcattacaacagcacggttgccggtgccaatgtgcagcaggcggtgacgctgggtaatattctggtggggattatggcgctggtggtggcttatgtcatgacccgcaacctgccaggattgctggaagtgctggtattatctcgcttgcagctgcgtcagggcacgtcctacgccataaccactatgctcacttatctgattacctcggtcggggctattaccgccttaagttctctcggcgtttcgtgggataagctgcaatttctggtcgcggcgctaacggtgggtctgggatttggtttgcaggaaatcttcgctaactttgtgtccggtatcattatcttgttcgaacgtccggtgcgtatcggtgatacggtgactatcggcactttctccggtacggttagcaaaattcgtatccgcgccaccaccatcaccgattttgatcggaaagaagtgatcatcccaaacaaagcctttgttaccgagcgcttaatcaactggtcgctgtcggatacgattacccgtattctgattaaagttggcgtggcctatggctctgatttagataaagttaaagaagttcttctgaaagccgctcatgataatccgagagttatgtccgatccggaaccgcaggtgtttttcctcaatttcggtgccagtacactcgatcatgaattgcggttgtatgtacgtgaactgcgcgatcgtagttacaccgtggatgagttaaaccgcgcgattgataagctttgtcgcgaaaacgacatcaatattgcgttcaatcagcttgaggtttatctgcataaagaagatggggcagaagtgcaggaagtcagccgtcctattaatttgatgccggataacgagcggaaacaactgcagccttagtttgaaacgggttttggatcggaaaaactaattggaaaacccataaatgctgagggcgaagccggagaggtttcgccctttttggggcagcgttgtaagccgtagtcaggcagggaattattcctgacggtgatgactcagcttttgctgatagtcacgcttaacaatttccagcgctgccagcgccgtttctggcgcaatttcgttgcattccagcaggtaaatcaaatctaccgctagctgcaattctggtggggcgtgttcaactgacatatgagccaacattagggtttcagtttgagtgaagaaaatccaacgtgacaccaaaaacaatctggtgcagttatatccgtgccgtcaatgcgaatgccggcagaactgacaaatcgataagctgcattatcccgcataatccggtggcatagtgaggaagccggccagcctcagagacgtaaatatatgcgtaatgaatcaactttgaatgcatgctagctaatcagaatattattatagataataaatttaaaccaaataatcatcatttatgcaaatgtgacccgccttcaaaaaccattatcttttctctcgatactgcgctcgattcgcgtcaaagcctgacgacaacgcattaatcggccttccagcgccgccagttccttctggattcgctgctgatccaccagacgggtttgttgtcccaactgactttcacgatcttgaatcatagtgatgatccgtctttcataatcctgatgctctgccagtttatggtacggatcctggctaacctgtcgtggtttgggctgatttttacgtagggtttgagtcgcgagctctcgctgtaaagctgaaatctgcgccaccagcttttctgccaaaaaagccacctgttcggagcgctgttcggcgacgacttgcttcaattgtgtcagattcttgcgaacctccagcagataatcccgcaaacgcgtgccgtggttactgaaaagaagctgatcaaaacgagcctgagccgtaggcgtgtgcgcctgtggggcgatttcagccgacagtgcttcaacctggctttcaagcacctgtaacaatttttctgtgctcatggaattctctcctgatattcttggggctagcttgcctttgaacccgccgggaaacaaggaataaggactggtttgggtaaattgaatcatgaatcgactggtggtgaatctggttaatgataaagtaccggttagtatctttttcaatgatggtgagaataaataaagggagcttatgtctcgttggttgttaatcatcctgggatggaccgccgtggtcttggctaccttaggcgtggtattaccgttgttacccaccacaccatttttgctattagccgcttggtgtttcgctcgctcatcgccgcgttttcatcagtggctactctatcgttcatggtttggcagctatattcgcaactggcagcaacatcgggcgctgccaccgggagccaagtggaaagcggtactggtgacgcttatcactttttccatatccctgtggctggttaaaatctggtgggtaagaatgctgttagcaattatgcttatcgttttattgattttcatgctgcggatgccggttattgacctaacgcaacaaaaaaagcgctgattatctggctccggttgcatttttccatcagtttgaatagatttgagcgttttcgtgcgcggattgccccatagtccctgtttagggcgttaaaaggggtggatgtgttctgtcccggcggtgtttgatcgacatcgggtggccgcgttttagtatgttcagcagttttatcaggcacaaattatgaccgctaccgcacctaatacagcacaacagcttcagtatattaaagacagtattgaaaccatccctgactatccaaaaccgggcatactgttccgcgatgttaccagcctgttggataatcctttggcttacgcttccagtatcgaactgctggtagaacgctatctggacgctggcgtgaccaaagttgtaggtaccgaagcccgtggcttcctgttcggcgcgccggttgcattggctctgggcgtaggttttgttccagtccgtaagcccggcaagctgccgcgcgaaaccattagcgaaagctatgaactggaatacggcaccgataagctggaaattcacaccgatagcattaaaccaggtgataaagttctggttatcgacgatctgttagcgaccggcggaaccattgaagcgacggctaaattgattcaccgtttgaaaggtgaagtggttgctgcggcatttattatcaatcttccagagctgggcggtgaaaaacgcctgacggaacaaggtattgattgctacagtctggtctctttcgacggtcattaatttgaccatgccttttggcaatcggtaaaaaaaggcctcgttactgaaatagcacgaggcccagttaattctctattgctgtctgaatgatcacagtctgactgcactttcagctaaccatattttctgttaacaatattctcggttaacaatactcgctgcgaataacactgcatctgacgattacacattagcatttgccggtgatttctgtcgacgtttacgccaacgccttaatataaaaggcaatatcaatactgccacagccagaccgagtaaggtttgggcgattgcaccctgccataagatactgaaatctccgttactgatggaaagcgcgcgccgtaaattctgctcaagcatttctcccagaacaaagcctaaaatcagcggtgacatcgggaagttcatttttcgcagcagatagccaaagacgcccagtccaaccatcaagaccagatcaaatgtggtgctgtgtaccgcatagaccccgactgcagaaacggcggcgatcgccggcactagaaaccataggggaatggtgagcattcgggtgaaaaaaccgaccaatggcagattcatcaacagcaacatcacgttggcaatcagtagcgaagcaatcaatccccagacgatgtccggctgctcggtaaacatggctggccccggcgtgatgttatacagcgtcaatgcgcccatcatcaccgccgtggtgcctgaaccgggcacgcctagcgtcagcattgggataaacgaaccgcaggccgaggcattgttggccgcttccggtgccgccacgccgcgaatatctcctttgccgaagctttcgctattgccgctgatttttttctccgtcatgtaagtcagcgcgctggcaatggtagcaccggctccgggcaggatccccacgaagaaaccaatcactgaagaacgcagggttggccccacgcattccgccgcctctttacggttaaataacagacggccggtttttcgcaccagtttttgcccggtactggtgccttctagcatcagcaaaatttcgctgaccgagaacagaccaatcaccaccacgataaactgaatgccgtcagagagatggacgctgtcaaaggtgaatcgatataccccggtgttggcatcgacgcccaccgttgccagccccaaaccgattaatgctgccaatagtgatttaatcggattctggctcatcatgctgcccaggcaagcgatggcgaacaccatcagtgcaaaatactctgccggaccgaatgagagcgaccattgcgccagcaacggtgcaaatagaataatgccaccaatggcaatgattgaaccgacgaaggaacttaccgctgagatagacagcgcaatgcctgcgcgcccttgctgcgccatgggatagccgtcgagcgcggtcataatcgccgccgcatcgccggggacattcagcaatatcgaggagatacgtccgccgtattcacagccgatataaaccgttgccagtaaaatcagggcagattctgctggcagctttaaggcaaacgccagcggcagtaaaatcgccacgccattgattggcccaagaccgggtagcaggccaacgatggtgccgataaagcaaccaatcagggcaatcatcaggttttgtggcactaatgccacttcaaacccttgggataaatacatccaggtttccattattgcctcgttagttcagccaaacgccgagcggtagggtgacatccagtaagtggtcaaaggcataaaataaagcaataccgataaccaccgccgatagcagcgcctgaatcaggctggcctggaacaacagcgctatgctgaaggtcaacaaagccgtagcgagtggaaatccgagccattcaaaaccccagccatacagcaccagcgtaatgatcatcaccagcaaacgctgtaatactttactgtgcggccaggaaacggtttccggcttgcgcagcagtaatagcactgcacacagggtcattaacgccagaatagcgatagggaaaggccttggccccagtggttcatagctgtattcgctttgaattccccagccgataaacaagccgctgacgcacagcagaatccagataccggcaaaaatgcggtcgctcatcatctacctccgattacttagctaaaccaaaggctttggcttgttcacgatattgttcaacctgatttttgacgtaagtatccaatgctttgccgcttagattgaattcaaacagcccacgcaagtcgcgctgctttttaaactcttcggtttgagtcaaggtgttaaaggtgttaatccaccattggtattcttcttcagtcacttttggccctaaatagaaaccgcgaataattggccacaccagattgaagccttgctcttttgccgtaggaatatcagccagttggccgggcagacgctgttcggaatacaccgccagcacgcgcagtttgtcaccgcttaaataaggcaccatttcgcttaaatcgccggaaactgcctgaatatggttacccagcagcgccgttaccggctcgccgccgccttcaaaagcgacgtagcgcattttgtgaggatcaacgccgacttcgcgcgccagcaacgcggttttcatccaatcctgacttccaatggatgctccggcaccaaataccacgctgtttggatctttcttgaacgcatccatcagatctttcagcgttttatatggagagtcgctgcgtaccgcgatcatgccgtaatcggtgccaaccgcggccagccacttcacgtcattcgcgttataacggccgaatttgttttgcgacagattcagcagcgagccgccggaaaatgccacgacggtgccgaattccgccggacgctgcgccactatggcgttataggccacagcgccaacaccgccaggcatgtaggtgacgcgcatcgggcggtcaatggctttggtttcctgtagggaaacctgaatcaatttacaggttaaatcaaagccgccgccgggcttggcgggagcaatacattcggtgcgcttcggtggatctatcgccaaaacttgttgtgcggctaacatcaggacggaagcggtgagagcacgggtaattatatttttcatagcgattcctaagttattttcttacaaactgtgagccttcccgcgattgcgaggttgctgaattgttaaaacaataacctttcagttacctttcaacggtcaggaaaaagtacaggatgtgatatgcgtctcttgttggtagaagatcatcccgaattatcccattggttacagaaggctttgactcacgcggggtttgccgtggatatcgcccatgatggaattgaagccgagcatttgctgcaaaacgaaagctacgctttagtcgttttggacgtggccttgccgcgcttgaatggattagaggtcttggcccggttacgtaaacgtggacaaactttgccagtattattgctgacggcgcgcaccgaggtagcggatcgggtaaaaggtctcaatctgggcgcagatgattatctcaccaagccttttgaactcgacgaactggaggctcgcattcgcgctttactgcgtcgcagcgtgggcgtgactcagcaagctctgcaatttggttctctgacttatcacgatgagggatattttttactggacgataaacccttggcgctgacgcctcgagagcttgcggtattgaccacactgatgcatcgccgtgggcggccagtggcaaaacagcaattatttgagcaggtttttaccttgtcggaggaagctaacccggaaagtattgagctgtatgttcatcgagtgcgtaaaaagttgctggggagcgatgtgtcgatcatgacattgcgcgggttaggatacagtctggaatgcgaacatgggcagggctaaaggcgctggcctgacaacgtctcgttcgttattccatcaattattggtgtttttcgctctacctttactgattctcggcggcctttcgatttatacccattatatcagtgcgatgaatgcggcaacgctggcttacgatcgctcgctgttagcctcggccagaaccgtcgcggaacggctggtagtgagaaacggccgtttggaagtggatgtgccttacattgtcctggatagtttcgaacgtaacatgaatgatcagctttattatcaggtcattacgccggaaggcaaaagcattgccggttacgatgatttaccgccgctaccgcccaatacgccgcgctcgaatctttatcccgcattggtacatttttatgatgctcattatgacggaaagccgattcgtgtggctgcgctgtatcagccggttaacgaagagggcgtaatggggatggtgatggtgctcgtggccgaaacgctggcatcgcggcataatctggcgcagcaaattatggtctctgcggtgctcactcagggggctttagtgttattcacgctggctatggcttatctgctgttgaagcgaattcttaagccgctacgtaaactctccagcctgatgttactgcgcgatcccggtgagttaacgccactgcctaaaattctcccctggtctgaaatggcgccgttgctgctggcatttaaccgctatatccagcggctgcgggaaatggttgagcggcagggacgattcagcgccgatgcttctcaccagctgcgcacgcctctggcggtgctgaaaacgcaggctgcggtggctctggctagcaacgaaccggctcagtggcgtgaaagcctacaggcgatgaaacacactctagataacacggtggcgctaactgaccgtctgttgcagctttcccgcgttaaagtggtagagcgaactctgcaacctgttaatctctctcaattattgcgggacgcttgttttgcccgtgtgccgcaggcgcgtagcaagcatattgatttgggttatgaaagtgatggggagtaccgaattgcaggggatgggctgctgctggccgaactgtgcgataacctgttggataacgccttgaaatacacgccagacggtggaacggtcactgcacgcttgcatcaggatcagcatattgatcactgtattttggaaattgaggacagtggccccggtattgccgataacgaaactgaacaggcgcttatcccatttcaccgtttggataacgttggcgaacagtccggagccggtctggggttagcgttagtcaaagatattgccatctaccatcaaagccatccggagcttctgaccgggggaaatctgggcggactgctggtacgtatccgttttcatttattggctcaatctattggtaagcctaatgattaataaaatcgctgtatcaggttttcaataactgtgtgctgcgagcggagaagggtgtgcagctcagtcaggcttaaatcgctgaaatatgatgttcaaagtaataggaatgacaatcaacgtactggtacagtatagtgatagatgatatgggtataactttgatggtgtcgataggttatatcttggtagtaaaggtgaatgaaaacaatccagtatgaaatataagcggtaacggtgtttttgttttttctgtataaatggtcttctcaatctcagcgatgaagtattaatgagctatcaggtccttgcccgcaagtggcgtccccaaacttttgctgaagttgttggtcaggaacatgttctgacagcgctggctaatggcctttcgttaggacggattcatcacgcctatcttttctccggtactcgcggtgtcggtaagacctctattgctcgtttattggcaaaagggctgaactgcgaaaccggtattaccgccacgccatgtggcaaatgcgccaactgcctggaaattgagcaggggcgtttcgtcgatctgatcgagatcgatgccgcttcgcgcaccaaagtggaagatacgcgcgaactgctggataacgtgcaatatgcgccagcgcgtggccgctttaaagtttatctaatcgatgaagtgcacatgctttcccgccacagtttcaacgccctgttgaaaacgctggaagagccgccttcacacgtaaaattcctgctggcgacgacggacccgcagaaattaccggtgacaattctttcccgctgcctgcaatttcatctgaaagcgctgtatgtggaacaaattcgtgctcagcttgaaaaagtgcttcaggctgagcaaatcgacagcgatgctcgcgcgttacaactactggcgcgtgcggccgatggcagtatgcgtgatgctctgagcctgaccgatcaggcggtctctatgggccaggggcaggtgaccaccgcgacggtcagccagatgctgggaaccttggatgatgaacagccgctggcgatcatcgaagcgctggtgagcgccgatggtgcgcgggtgatggcgcagatagaacaggcggcgtcacgcggtgtagattgggaaaacctgttggttgaaacgctcagtctgttacatcgcattgcaatgattcaattgctgccatccatgctggataatcattacgcagaaatagaaccgcgtttacgtgaactggcgcgtactttgccgccaacggatattcagctgtattaccagacattgctggtggggcgtaaagagctagcttatgcgccggatcgccgtatgggtgttgaaatgacgctgttacgcgctctggctttccacccaaaagcggttatcgcggagccggaagttgttccacagattccctctccgatcggtgcgccgactcatgctataccgcagcgtcacgccgcgccgcagccggtaacgtctacaccagctcggtcagagccaatgccgccagcatcggtgccggaatctaccgctcagctattgcaggcgcgaacccagcttttacgacagcatgggacatccagcccaaaaaagaatgagccggcagcgcctgacaaagcgcggccggcaatctcggctctggagcgattggcttcagtaaccgagcgtagtcagcagcgtcaggctgccaaagccaccgaggcgaaaccgggcaagaaagaggcgtatcgctggaaagcgcaaaacgaacctgaaacgccgccggagccagttgctacgcctaaagcgttacgttcggcgctagaacatgagaaaacgccggagctatcggcaaaattagcggaagaggcgattcttcgcgacccttgggcggcggagataaatcagcttcagatccctaaattggttcagcagttggcgctgaatgcatttaaacaacagatagaaccgggtaatatttgccttcacctgcgttcgtctcagcgccatctgaattcgccgtccgcgcagaaagtgttgacggaagcgttaagtgggttgtacggcagcccggttgaactaagcgtgattgaagacgacaatccggcggagctaacgccgctggaatggcgacaggcaatttatgaagagaagctggcgcaggcgcgtcagtcgattcttacggataagaacattcagactctgcgtcgattctttgatgccgagctggatgaagaaagtatccgacctatttaatcgctgcggtacgtgcatggtgcacagacgcggcccttgctgtgagagaagactatgtttggtaaaggcggtattggcaatttaatgaaacaagcccagcagatgcaggaaaaaatgcagcagatgcaggaagaagtcgccaaattggaagttaccggtgaagctggcgcgggcttggttaaagtgactatcaacggtgcgcataactgccgccgcgttgaaatcgatccaagcctgctggtggaagacgataaagaaatgctggaagatttgattgcggccgcattgaacgacgccgcacgccgcattgatgaaacgcaaaaagagaaaatggcctccgtatccagtggtatgcaactgccaccgggctttaagatgccgttctgatgcaaaccagcccactccttgaaacattaatggagtcactgcgctgtttaccgggcgtaggcccaaaatcggcgcagcgtatggctttccacctgctacagcgggatcgtagcggtggaatgcgtctggctcaggcgctcacccgcgcgatgtcggaaattggccactgcgtcgattgccgtacttttactgagcaagaaagctgtaccatttgcgctaatcctcgccgtcaacaaaacgggcagatttgcgtggtggaaagcccggcggatattcacgccatcgaacaaaccgggcagtttggcgggcgttattttgtcctgatggggcatttatcgccgttggacggtatcggccctgcggatattggtctggatctgttggaacaacgcctcgccagcgaaagtatcagcgaagtcattctggccactaacccaacggtggaaggtgacgcaacggctaactatatcggccagatgtgcggccagtatggcgtattggctagccgaatagcgcatggcgtgccggtgggcggcgagttggaaatggtggacggcaccacgctgtctcactctctggctgggcgacatccgatcaaatattgatcctttttcaggtcaggcggcggtttattattgattatcatatgaataatatcatttgagataatctggccgtcgcccctgcttatgctttttttctctcaaacatcacttttcagacttgaaacacctccttacaacccccatctgatctccatcattcggctatatccgcctgcacagtaatttgcattgaggtaactaatgagtatgaaaggtcaagaaacccgtggttttcagtctgaagtaaaacaactgcttcatttgatgattcactcgctttactccaataaagaaattttcctgcgcgagctgatctcaaatgcttcggatgcggccgataagctgcgtttccgtgcgctttctgcccctgaattatatgaaggtgacggtgaactgcgcgtccgtttgtcttgcgataaagaaaaacgcactctgacactgagtgataacggtatcggtatgagccgcgacgaggtgattgaaaacctcggtactatcgctaagtccggcaccaaagcattcctggaatctattggttccgatcaggctaaagatagccaactgattggtcagttcggcgttggcttctactctgcttttatcgtggcagataaagtcaccgttcgcactcgtgccgcaggtgcaccggcggatgctggtgtgttctgggaatcagaaggcgagggcgattacactatcgctgacatcaccaaagaagatcgcggtactgaaatcaccctgcacctgcgtgaaggggaagatgagtatctggacgattggcgtttgcgctcaattatcagcaagtattccgatcacatcgctctgccggtggaaatcgaaagtaaaaacgaagaagacggcaccgttagctgggaaaaaattaacaaagctcaggcgctgtggacgcggagtaaagccgatgttagcgatgacgaatataaagcgttctacaaacacatcgcccatgattttaccgatccattaatctggagccacaaccgcgtagaaggtaagcaggaatataccagtctgctgtatatcccagcgcaggcgccttgggatctgtggaaccgcgatcataaacacggcttgaaactttatgtgcagcgcgtgtttatcatggacgacgccgaacagtttatgccgaactatctgcggttcgttcgcggcctgatagattctaacgatctgccgctgaacgtatctcgtgagattttgcaggacagtcgtattacccagaatttgcgtagcgctctgagcaaacgcgtactgcaaatgctggaaaaactggcgaaagacgatgtggaacagtaccagaagttctggcaacagttcggtatggtactgaaagaaggcccggcagaagatggcagcaacaaagaaaccattgctaaactgttgcgctttgcttcaacccataccgacagctcggcgcagaccgtttcgctggaagattatgttagccgtatggctgaaggtcaggagaagatttactacattactgccgacagctatgccgctgcgaagaacagcccgcatctggaactgttccgtaagaaaggcattgaggttctgctgttatccgatcgtattgacgaatggatgatgagctacctgactgaattcgatggcaaagccttccagtcagtgagtaaggccgatgaatccttggataaactggttgatgcagaaactccggagcagcaagaagcggaaaaagcactggagcctttcgttgagcgcgttaaaacgctgctgaatgaccgagttaaagacgtacgcttgactcatcgtttgaccgacacgccagccatcgtcaccacaggtgccgatgaaatgagcacacaaatggcaaaattgtttgccgctgcgggtcagcaagcacctgaagtgaaatacatcttcgagctgaacccagaacacgcgttggtaaaacgcgccgcagaagtcagtgatgaaagcctgtttgcggagtgggttgagctgctgctcgatcaggctctgttggcagagcgcgggactttggatgatccaaaccagttcattcgccgtatgaatcagttactgacagcctaatttgcaatgcgattgcccctgaccaaaagctcggttaggggcattttaaccgcacaatcacggcttttctctgccaaatcaattcagttagtctcatttcttcaattacctcctccggcaaggtgccttgagcgatcacccgtggaaatggtatggttacgcgttttctgcattttcgatttcattctagtaaaaacacatagaaaaactacatagcaaggggatttacgcaatgcgtatcattctgctgggcgctccgggcgctggtaaaggaactcaagcgcaattcatcatggagaagtacggtattccgcaaatttccactggcgatatgttgcgcgcagctgttaaagccggttcagaattgggcttaaaagcaaaagaaattatggatgctggcaagctggtgaccgatgagctggttatcgcactggtaaaagagcgtatcactcaagacgattgccgcgacggcttcctgcttgatggtttccctcgtaccattcctcaagctgatgccatgaaagaagccggtattaaggttgactacgtcctggaatttgacgtgccagacgaactgatcgttgatcgcatcgttggtcgtcgtgtccatgctccatctggccgtgtttatcacaccaaattcaacccgcctaaggttgaagataaagatgatattaccggtgaagagttaaccattcgtaaagacgatcaggaagccacggttcgcaaacgtttggttgagtaccatcagcagacggctccgctggtttcttactatcgtaaagaagctgatgcaggcaacacccagtactttaaattagacggaactcgcaaagtttctgaagtaagcgctgaattagctactattttgggctaatatgctgagtagacaaagaaggcggccttgggtcgcctttcttatttatgtattgcagaggtgaagtagcagggagtttatatttatggccgcctcgctataatggcagtaaataaacgcgctgtgtgtcgcgggtttaaatacattgcagcttattagtaaaggaagggaactgactcatgcaaagcaaacttggcgttctgatggtcaatctgggaacgcctgatgccccaacgactccagcgattaagcgttacctggctgagtttctcagcgatcgccgagtagttgatacttcccctttgctttggtggcctttattacgcggtgtcatactgccaatccgctctccgcgagtggctaaactgtatcaatcagtttggatggacgaaggctcgccgctattggtttttagtcgtcggcagcagcaggcgctagcggcccgaatgccggacacaccggtagagcttggaatgagctatggctcacccaatttatccgatgccatagaaaaactgttggcacaaggcgtaactaaactggttgtgttaccgctttatcctcaatattcctgttcgaccagcgctgccgtatgggatagcgttgcacgtattctaaaaaattatcgtcgtttaccttctatcagctttattcgtgactatgcagagcatcctgcttacattgccgcattaaaacaaagcgtagaacggtcttttgagcagcatggtcaacctgaccgtctggtgctctctttccacggaatccctaaacgttacgcacagcttggtgacgactatccgctgcgttgtgaagatacagcccgcgcgcttacggcggttgtgccgctgcccgcagaacagatcatgatgacctaccagtcacgatttggccgcgaaccctggctcactccttatactgatgaaaccttaaaaagcttaccttctcaaggtgttaagcatatacagctgatctgccctggcttttccgctgattgtcttgaaacgctagaggaaattaaagaacaaaatcgtgagattttcctacatgcaggcggcgagaagtttgaatatatccctgcattgaatgatgatattgcgcatattgacttgcttgagttattagttaaacggcacatgtagtgccttgctaaatataagcgctctatatatagagcggcttatgtttagctgaaagtttgatttttaaatactcgaagacatgaagaaaatcaaatgaatacattcggttacgatttattgtgcaaagggcattctccggattttctcgtattatcttagtcaattaaagcgtggcataaatcacgtttttcttgtaatagcggggtattagtacgagaattggcacaaaattttaatgccttaattaaatgaatgtttaacttaaaatgtgtctgctgtttaggaatgctctgagaccgatttaaggccaaagcgcgtaccctcaagccccctgcggggccacagacctaaaccttcgaatcagtgcattggtagctgcaagccaagggcggtagcgtggggattttattctatttatacgacgatgcctttcatggatgaagagatcgctactccatgcattttgttaaaatcattcgctaagattaattcttaaaaagataaaaatcagtgaggcgaattaatttacttatttaaatttatttaattcggatttatatatgtctttagaaattaaattgcatccatccggtgttatttttacttctgatggtactgaaaccattctggatgcggcacttgaaaataatatcaatattgagtacagctgcaaggacggaacctgcggcgcttgtaaggctgttgtgctatcaggcgaggttgagcaaggtgagaatacattcttatccgaagaagatattgctaagggttcaatactaacttgctgttctaaagcaaagtctaatgttgaattagacgttcattattatcctgaacttagccacataaagaaaaagacttatccctgcaaagttgacaatattgagtatcttggcgaagacattgccattttgtcgctaaggcttccacctagcgccaatatggagtatttggctgggcaatatattgatttaataattaatgggcaacgccgtagttattctattgctaacgcgcccggcgggaatgttgagctgcatatacggaaagttgctaatggacttttcagtcatatcatttttaacgaattaaaaccacagcaactcttacgtattgaagggcctcagggaaccttctttgtgcgtgagaataatgaacctattatattccttgccggtggtacaggttttgctcccgttaagtctatggttgaagcattaatttctaaaaatgatcaacgtgaaatgtatatttattggggaatgccgacagggaatagtttttattccgatatcgcaagggaatgggcaattcagtaccccaatattcattatgttcctgtagtctcaggtcatgatgaaagttggactggtgcaactggatttgtacatcagtcagttcttaacgatatcgccgatctcagtctatttaatgtttatgcctgcggttccttagctatgatatctgctgcgcgcgctgattttataaagaatggattaaacgaaaataaatttttctctgatgcctttgtgccatcaaaatagctttgatttgtcaaagtaatacgtaatggagattctagtgaaagcagtcattcttgccggtggtcttgggacccgtcttagtgaagaaaccgtagttaagccaaaaccaatggtagaaattggggggaaaccgatcctctggcacattatgaaactttattcatcctacggaataaatgattttgttatttgctgtggttataaaggctatgtcattaaagagtattttgcgaactactttatgcatatgtccgatattacattctgcatgcgtgataatgaaatgacggtgcaccaaaaacgcgtcgagccttggaatgttactttggttgataccggtgagaattcaatgactggtggccgcttacgtcgagtaaaagattacgttaaagacgatgaagccttttgcttcacctatggtgatggtgtcagcgacgtgaatatcgcggaattgattaaattccataaaaatcacggtaagcaagcgaccttaactgccacttatccgccaggccgtttcggtgctttagacatcaaagataaacaggttcgtagctttaaagagaagcctaaaggtgacggcgctttaattaacggtggctactttgtcctgtctcctaaagttattgatctaattgatggcgataactcaacttgggagcaagaaccattaatgaccctggctgagcagggcgaactgatggcttttgagcatacaggtttctggcagccaatggatacactgcgtgacaagctctacctacatgaactgtgggaagaaggacgcgcaccttggaaggtatgggaataaaaaatgattgatgcaagcttctggcaaggtaaacgtgtttttgtaacaggtcataccgggtttaaaggtggatggctgagtttgtggttgcagaacatgggggcaacggttaaaggttattctctggctgcgccaactgaacctagcctatttgaaactgcccgcgtagctgacgggatggaatcagaaatcggtgatattcgcgatcaacaaaaactattaaactcaattcgtgaatttcagccagaaatcgttttccatatggcggctcaaccgctggtaagactatcctactcggaacccgttgaaacatactcaactaatgttatgggcaccgtctatttactggaagcaatccgtcaagttggtggcatcaaagctgtggttaatatcaccagcgataaatgctatgacaataaagaatggatatggggctatcgcgaaaatgaagcgatgggaggatatgacccatattccaacagtaaaggttgcgctgagttagtcacatcttcttatcgtaactctttctttaatccagccaagtacgatcagcatggtacagcactggctactgtccgcgccggcaatgttatcggcggcggcgattgggctttggaccgtattgttccggacattttacgtgctttcgaagagtcaaaacctgttattatccgcaatcctcacgccattcgtccttggcagcatgtgcttgaaccgttgtccggttatattttactggcgcaaaagttgtacaacggcggcgtagaatatgccgaaggctggaactttggtccgaatgaagcagatgctactccggttcaaaatattgttgaaaaaatggtcgaattttggggtgatgatgcaagttggcaattggatggtaatgaacatccgcacgaagctcactatttaaagttagattgttcaaaagctaaaatgcaacttggctggcacccacgttggagccttaacaccacgctggaatatattgtggcctggcataaagcctggctagccggcaaagacatgcatgaatatagtgttaccgaaattaataattacatgaaaactagatgatttgaggtcatagaaaatgagtcaagaagaattacgtcaacagattgctgggctagttgctcagtacgctgaaacggctatggcccctaagccatttgaagcaggtaaaagtgtcgttccaccttcaggtaaagttattggtgctaaagaacttcagctgatggttgaagcatctttggatgggtggttaaccaccggtcgttttaatgatgcttttgagaaaaaactgggggaatatctcggtgttccttatgtactgacaaccacgtcaggatcttcggctaacctgctagcgcttactgcgctgacctcgccaaaacttggtgcacgagcgttgaagccaggcgatgaagtgattactgttgctgctggtttccctactacagttaaccctaccattcagaatggcttaattcctgtcttcgttgatgttgatattccaacttataatgtgaacgccagcctgatcgaagcagctgtcagtgataaaactaaagccattatgattgctcatacgctgggtaatttatttgatctggctgaagttcgccgtgtagcggataaatataacctttggcttattgaagattgctgtgatgcattaggttcaacctatgatggcaaaatggcgggtacatttggtgatattggtaccgttagtttctaccctgctcaccatattactatgggtgagggtggggcggtatttaccaaatcagcagaactgaagagtattattgaatccttccgtgactggggccgtgactgctattgcgcaccaggctgtgataacacctgtaaaaaacgctttggccaacaactaggttctctaccattcggttatgaccataaatatacctattctcacttaggttataaccttaaaattacggatatgcaggctgcctgtggtttagctcagcttgaaagcgtagaagaatttgtagaaaagcgtaaagccaattttaaatacctaaaaagtgctttgcagtcttgtgagcaattcctcgagctgccggaagccacaccaaactcagatccatcttggttcggtttcccaataacgcttaaagaagacagcggtgtaacccgtatcgatttggttaaattcttagatgaagccaaaattggtacacgtttactgttcgctggaaacttaacgcgccagccgtatttccacgacgtgaagtatcgtgttgtcggtgagttgactaatacagaccgtattatgaatcaaaccttctggatcggtatttatccaggcctgacacatgatcatctggattacgtagttagtaagtttgaagaattctttggtttgaatttctaataggagtcaggaggcaactattgcctccttttaatatgaagatacttattaccggtattagtggctatctcggtagtcaattagcaaattcgttaatcgatgaacatgagatagcaggaactattcgtgaaaactcttcatataagcggttgaataatccggataaaattagattaattgatctatctgaaatggattggttattgaaaataaacgattttgatccggatattgtcatcaatactgctgcattatatggccgtaatggtgagccgctttctcagttagtacaggctaatgtccagtttccgttgctaattttagagatgctttcttctaatggttctggtgttttcctaaattgtggaacatccttaccttcgaatgttagtgattatgcattaactaaaaatcaatttagcgaattggcgaaaaagtatagtgatagatttaccgggaagtttatagatttaaagttagagcatttttatggcccttatgatgaccaaacaaagttcacgacatatgtcattaatagctgcaaagaaaataataatctaaaattaacagcaggattgcaagaacgcgattttatatatatagaagatctgcttaatgcatttaaatgcctcattaaaaatatagataacttagtatctggtgaaagcataccaatcggttctggacaagcaataacaattagaaaatttgtagaaaccgtagctaaaatcactaattatcaaggcgagctagagtttggagctatacctactcgtcaaaatgaacttatgtacagctgcgcttcattagaaagaatgaatgagcttggctggaagtgtgaatattcactgaatagtgcaattaaagatactttaagtaaggaatagaaaaatgaagcttttgattactggtggctgcggttttttaggcagtaaccttgcatcacatgcaatcaagttggggatggaggttatagtttttgataatttatcccgctatggctcgtcagagaatctacaatggttacgttctatcggtgattttacgcatgtgcatggtgacattcgaaacaagaatgatgtaaccaggttaattcagaaattcaaacctgataatgtatttcatcttgctggtcaagttgcaatgactacatcaattgataatcctcaaatggactttgaagttaatgttggtgggacatttaatcttctagaagcaacccgtctttttaatcccgaatgtggaataatttattcatctactaacaaagtatatggagatcttgagcagtttacgtatagagagaataaaactcgatatgaatgtatcgaaaagccaaatggatttgatgaaagtgttcaactgaccttccattctccttatgggtgttctaaaggcgctgcggatcaatatatgcttgattacgcgcgtatttacggccttaaaacagccgttttccgtcattcttcaatgtatggcggccgccaatttgctacttatgatcaaggctgggttggctggttctgccaaaaagcggtagaagctaaccgtgggattaaagctccgttcaccatatcaggtaatggtaagcaagttagagatgtattacatgcagaagatatcatttcactttatttctcaactctagctaagttggatttggccagaggcaatgcttttaatattggtggaaccatacagcacagtctttctctgttagagctattttcattattagagaagtattcaggtgtagaattaaattatacccaattgcctgttcgggaaagtgatcaaaaagtttttgtagcggatataaataagattaataaatttactgactggtcaccgaaggttgatgctagtgaaggtgtcaggaaaatgtacgactggtgtaataactactaattatcataagcagcggcatgcgagctcagagcatgctgcacaacaaacactttataaatggaatattgtggaactttttataaagaaaataccaactcatatatgggttgctttatcctcgtgggtatctagaataatttctgcagcaattcaacttttaagtattagatacttgctagatatgatgggcgaaaatggctacgctgcctttactttacttgccggccttgttgcttggggaacgttggctgactttggcattggatatagtttacaaaattttatatctgagcaaagggcaaataagaaaaaatataatgactatatattgacatcagcatgcttaatattgattggtatattggttttgatgtcaactttatggccattaacaaagtttttagcaccagcatatttgcaagggtttgatgttcatacaatatctgacaagcatttattgctatacatcactctttgtatttttattttcaccagttttggtggggttctatataaaatatggtttgcggaacaaagaggttggattgctaatgtaattactgcattgtcttctttgctaggccttatgctaataattatattcagtaaatatagagcatctgccagtatatatttagctgttattatgttttttggtccggcagcactaatacctgttgtgatattcattgcaagaattctcaaaacattcaaaactgaatcaattaaaaaatttaattttaatctagttaataaagtattgaagagagcttccggttttgtgcttttttcttttttagctacaattgtcctccaggcggattatattgtaatgtctcaaaaattagccgctagtgatattatcatttacacggtattaattaaagtgtttggattggttctttttgtttattctgcattgttacaggccctttggccagtatgtgccgaatatagggttcaaaataaatggtctgagttaaattcaatcgtaagtaaatatataacattaggtgctatttttatcatcgtttgtagtattggtttttatctatttaaaatacaaatcattggtcttatctctaaaaaaataaatactaatatagatattacaacgatagctttattttgtgcatatttccttttgcggatttggtctgatacatatgcgatgctgctacaaagcatgaattatttacggccattatggtatttggtacctgttcaagcaattctgagtttgagcctccagtggactttagcatcagtttacgggatgaaaggtatgttaactggattgattttatcttttttatttactgtggttatatttcttcctgttttctataagagaaaaataagagaactacagtatgtctaatttattttaaatggttgaaaatttataaatatatatattttaaatccatttgaaaagttttcctgtgttctcaaagagtgtttaaaggattttagatgaacagcattaagatttcattttgtattccaacgtataaccgctgcgagttattatctgagctgatcggtagtattatttctcaggcggaagatagagatgatatagaaatctgtatttcagataatgcatcaacagataatactaatgaaatgataagctcttggagagagaaaacacatatcccaataatttataaaaaaaacagtgaaaatataggtcctgataaaaactatttagcttctgtcgctttagcttctggtgaatattgttggttgtttggcagcgatgatgtcttatctgataattcattagaaaagatggatgaatatttaaaaacaaattgtgaaatatacttgtgtgatcgtaatgagtgtgatctggcaatgcggaaagttgcttataggccttggatgactaccggcgatgtaatgtattccaccgagaatcatcaagaactaatacgatatttttcatgtagcaattcaattggagctgtatttagttttttaagctctattatagtaaaaagaagctcttgggagaatgtatcctttgatgagtcatttattggtagcgcatatagccatgttttttatctattagatatcgtgaagcatggtgcaaaaatccagtatataaataaaccattagttgatactcgacttggaaatgatttctttgccaaagacggtgtagtgagaagaatagaaatagactttaatggatatataaaattggctgagaaattctaccaaaactaccctaatgtaaagtccgagtttttggctattttactgagagagcattcagtcctgcatactaacatattaacctctgtatatggtgaaaagggacaaagagacagaatgaaacatcattttaaatacgctggcgctaatgcatttttggttgattttgtttattttgctaggcctttatatttattttcttcaaagttaaaacttgagtttctgtataaaaaaattcgtagattcctatataaatgatgttttatcgtttatatatttttacaaagcgccactttttattgtgagaaaaaaaatgttcgctgtaaataaaactattactgtctatgtttcactttatagcatgtctttgtggatcgcttttatcagcagtatcgtcaccggtcaatttaatggtgatctggtcggtatagatgttggacttgataacactactctattctatattgccctatttaatcagataataatattagcagtgccattattatataaaatagtgacacattataaattgagtttagggggataccgatttaatataaacataaatagattctcactatttatgtttataataataacaatgaatttagtgtttttcttgacaactggtgttggtaaggtcttcagcaaagagactcatccattagcacctttattcgtaattatagcacctagtggtattttttatttttactatcttatttctagagaaaaaagtggggtgttattttttttgaatgtttttttatattcatctctggaaataatgaaaggatggaccggatttatactggttcttgcaatttttgagatgtatttttttatcttaaggcacaggaattctaagtttttaaaaataccatttctattttctatattaatgcctttacttctattgatttttggaggtgcgttaaataagcatgtttttgttttaaaaaatgaaattagagggaattatgttaatgctgatgaattaagttattttgattctatcagtttgttgagtagtagattgactaatttttctgtgtctgcgggaatgtattcacgagttgaaagtgtcgtatccacggcaaaggaccagggggagtttactgagcttaaaggctttgcacgtagactgtttccaggggttattgaggatactggtttcaggactttaagtaattccacgatgttagctttttttcccgattatggtgagcaatctaacgtcgatactggtgtattaatgtattactatgtgctatttaaagctgatccatatggtgcagtattctcaattttattatcattatttttacttgtaagccttgtcgctttttatcgggcgatttcaaataaccataataatataaatatttttatatttattatgatattttatctattttacactgcttctactgaggcttcttttgttcggccctatataactggcgttatatttttccctcttctcttttctattggtgttattaaaattagaaagaagagtttaggcgatttagggggtgaagataaggtgagaaatgtgtaatttactgactcagccataaagttatatcaatacctggttatattaagtttttcattgattgcaggatctttatgaaaatagtttatgatgggattattaattcactgcaaagtaatggcggtattactgtttattttaaagaattagttactcgtctgcccagtgggaattttgattggtactcttacgataataaaattggtgatgtaggcgttaaaagtattgatcttaaaggccgtctttttgaacgctatagagattgcttattaccagatataaataaagatatatctccaatatttcattcatcctactatcgtctgcccaaagagcatatgcctgtagttacaactgttcatgattttacatatgaaaagtttgtcagcggtcctgcgaaatggatacacacatggcaaaaaaatagagcagtgaagcatagcgatttgattatttgtgtttcggaaaatactgcgaaagatttacagtattattgctctgtccctagtgataaaattagaattattcacaatggtgtgtcggataaatatcattctttaacgccaaccaaaactaatacgaataaagttatctttgttggtgcccgtggcggatataaaaatttcgatattgccgtaaaagttatatcgcgactccctcatcttgaattatctgtggttggtggcggtgagtttactgataaagaactatcactattaaatcagcatctaccccatcgctatcattggttggggcggctgagtgatgaagctttgaatgaggcttacaattctgcttatgcactactatatccgtcgagttatgagggattcggtattcccatcctagaagctatgcgtgccggatgccctgtagtcgctgtaggagtgtcttctataccagaggttgctggagatgcagcgatattagtgagccgccctagtgtggatgaattagtcgaaggcttagtcgcgatagataatgaaagatctaagtttattgaatttggctttcagcaagcagctaaattctcatgggataagtgttatcaagaaacactcaatgtttataaagaattgaataaataatacggattacaatattatgactaaaattgcgcttattacaggtattactggacaagatggttcttatttggctgaattcttattagaaaaaggttatgaggttcatggtattaaacgccgcgcctcttcctttaataccagccgtgttgatcatatttatcaagaccgccatgaagaaaaccctcgcttctttttgcattatggcgatttaactgatacttccaatttgattcgcttagttcaagaaattcagcctgatgaaatctataacttaggtgcgcagtcacatgtggctgtttcatttgagtcaccagaatatacggccgatgtcgacgctatggggacgttgcgcttattagaagcgattcgcattaatgggttggaaaaaaagactcgtttctatcaagcgtcaacctcagaactttatggattagtgcaagaaacccctcagcgtgaaactactccgttttatccgcgttctccttatgctgtggccaaaatgtatgcttattggattacggttaactaccgtgagtcttatggtatgtatgcgtgtaacggcatattgtttaaccatgaatctccacgtcggggcgagacatttgttactcgcaaaattactcgtgctgtagcaaacattgctttgggtttggaaaattgtctctatttaggcaatatggattcgttacgtgactgggggcatgcgaaagattatgttcgtatgcaatggatgatgcttcaacaagagaagccagaagattttgttattgcgacgggtaaacagattactgttcgcgagtttgttcgcatgtcggcaaaagaagctggaattgaactggagttcagtggtgaaggtgttgatgaaatagctactgtagtggcagtgagcggtaatcatgcctctgcagtgaaagttggcgacgttattgttcgtgttgatccccgttatttccgccctgcagaagttgaaacactactgggtgacccagcaaaagctaagaaagttctgggttgggttcctgaaattacagttgaagaaatgtgtgctgaaatggttgcaagcgacttgcaacaagctaaacagcatgctttgctgaaagctaacggttttgatgtatccatttcgttggagaattgatgataatggataagaaacgggtatttgttgcaggccatcgcggcatggttggctctgcgattgtgcgccaacttaagaatcgcagcgatattgaattggttctcaaaactcgcgctgaactagacctgatgtctcaagccgcagtgcaggcattttttactgatgaaaagatagatgaagtctatttggccgcagcgaaagttggaggaattcaggctaataataattatccggcagagttcatctacgaaaacttaatgatcgaatgcaatattattcatgctgcgcacttagccaatgtacaaaaactgctattcctaggttcttcgtgtatctatcctaaactagcagaacagccaatgactgaggccgcactgttaactggtattttggagccaacgaatgagccttatgctatcgctaaaatagcagggataaagttgtgcgaatcatataatcgtcaatatggtcgtgattaccgtagtgtaatgccaaccaatctctatggtgaaaatgataatttccatcctgaaaattcccatgtaattcctgcattattacgccgtttccatgaggcgaaattacataatgatgaggaaatggttgtgtggggaacagggaaaccaatgcgcgaatttctacatgtagatgatatggcagctgccagcgtacatgttatggaattatctaaccagatatacgctgctaatactcagcccatgctttctcatattaatgtcggtacaggtgtagattgtacgataagagaattagctgaaactatggcaaaagtggttggattcacgggcaaactagtctttgacacaacgaagcctgatggaactccgcgcaagttgatggatgttagtaggttagccaaattaggatggagttatcatatttccttggaagaaggactcatgatgacttatcagtggttcttagataaccagcataatttcaggaaataatatggctcgtcccttagatacatctttgttcaagactattgtggctaatacgccattgatatctatcgatctcgtcgtccaggattctcagaatagaatattacttggtaaacgattaaatcgcccggcaaagaattattggtttgtaccggggggacgagtaagaaaagatgaaactcttgctgatgcttttacccggctagcaaaagaagagttaggattagctacctctattcaaaatgcggcctttattggcccatttgaacatttctatccggataatttttctgaagaagaattttcaactcattatgtagtgcttggctacaaactggtcattgagacacctttagtacaattgccaaaagatcaacattcccagtattgttggagagcggtcgatgatttactttccgctgacgatgttcatcttcataccaagctctattttcaagacaggaagtaatcgctcatgctattacccgtaattatggcaggcggctctgggagtcgcctgtggccgctatctcggactcattatccaaagcaatttctggctttgacttcagaactcacaatgctacaggaaacgctacttcgattagacgagcttcctcatctagctccgcttgtgatttgtaatgaagatcaccgttttattattgctgaacagctgcgccagaaaaaactctcacatagcggcattgtattggaacctgttggtcgtaatacagccccagcaattgcgttggcagccttgcatgcgactttaaacggcaatgatccgttattactggtattagcggctgatcatgttattcaggataaacctgcatttattcaggccgtaaaacgagctgaacctcttgctgaagctggtaagttggtcacttttggtattgttcctaatagtccagagactggatatggctatatcaggcagggaactccggttgaagatggcgcttatcaggttgctgcttttgttgaaaaacctgacttagctaccgcgcaagaatatttggcttcaggaaattattattggaatagcggtatgttcgtgtttaaagcatcacgctatttacaagagctagggttacatcgacctgatattcttgaagcttgccagttagcaatcgccggtcagcgtgctgatttagacttcattcgactgaatgaagaggctttttataactgtccggatgattcaattgattatgcagttatggaaaaaaccagtgacgcggttgttgtgcctatggacgctcagtggagtgatgttggttgctggtctgcgttatgggaaataaatgataaagatagccagggaaatgttgttcgcggtgatgtattaatcgaagatatgcatgatagttatgtctattctcaaaataggcttgtggcgacggttggagtaaacgatctcatcattgtagaaactaaagatgcggtattagttgcgcataaagataaagtgcaggatgttaaaagtatcgttaacaaactcaaattagaggagcggtgcgaatatctgcaacaccgtgaggtataccgcccttggggctcccacgatgctattgcagaaggtgttcgctaccaggttcaacgtgtgtcagttaaaccgggccagcgcattgcaactcagattcattaccacagagctgaacattgggtcgtcgtatcaggtatagcaaaagttcactatggcgataaaacctatttagtgaatgaaaatgagtctacctatattcctgtaggaattgcgcattcaatagaaaatccgggaaaaataccgttagaaattatcgaagtacataccggaaactatctttcggaaagtgatgtagaacgtgtagataacttaggtgtagggtattaatgatgaaagtaagtattattactgctacgtataatagtgaaaagaccattatagatactcttttgtcgttagagaaacagacacatttagatattgagtatattattattgatggagcatcaaaagataatactcttaaagtgatagatagaaactcaaccagagtttctacaattatcagtgaaccagacaaaggtatttatgatgctttaaataaaggtatcttagctgctactggggatattattggttttttacactcggatgatttgctagctgattcaaatgtcattgccgatgttgttgcaacgtttgaaaataatggatgcgatgcggtatatggtgacttgcaatatgtggcaagggataatattgaccatgtcatcaggtgctggaaaagtggtgattttcgcccacgaaaaatgcagtatggatggatgcctcctcacccaacattttatatgaaacgtgaattatatgagcgttggggcggttttgatttaagtttcaaaatatcagcagattatgactcactaactcgatatattatatctcatcaggttaagttagcgtatttacctcgtgtgctaaccaaaatgagggtcggtggaataagtaatcgttcagttaaaaatatgattcttaaatcaaaagaagatattaagattatgaagaagcaagctttattttggcctgtgtcattaatctgcaaaaacttatctaaaatccctcagttcataaagtgatatatatgtctaaactaacttgtttcaaagcttacgatattcgtggtcagttaggcgaagagttgaatgatgagatagcatatcgtattggtcgagcctatggtgaatttgcaaaacctaaaacagttgttgtgggtggtgatgtaaggctaacaagtgagagccttaaacttgcattgagtcgtggtctgcaagatgcaggtacagatgtattggatattggattatctggtacggaagagatatattttgcgaccttccatcttggagttgatggaggaatagaagttacagctagtcataatcctattaattataatggaatgaaacttgtccgtcagggggccagacccattagtggtgatacaggtctacgggatatacaacgtttggccgaatcaaatgactttccgcctgttgttgagtctaagagagggagctacaagaaaatatcagttattgatgcatatattgatcatttaatcggttatataacgccatccttatttaaacccctgaagttagttataaatagtggaaatggggctgcaggacatgttattgatgctttggaaaagcgttttgataagcttgatatgcctgtaactctgattaaagtccatcattcaccagatggtacattccctaatggaatccccaacccgctactgccagaatgtagacaagacaccactgatgctgtattagcccatggtgctgatatgggaattgcctttgacggcgattttgatcgatgcttcttctttaataataaaggagagtttatcgaggggtattatattgtaggattgctagctgaagcgttcctacaaaaaaaaccgggctcaagtattattcacgacccgcgcttgagttggaatactattgatattgtaactgctgctggcggaaagccggtcatgtcaaaaactggacacgctttcatcaaagaaagaatgcgtgaagaagatgccgtttatggtggggaaatgagcgctcatcattattttcgtgatttctcttactgtgattctggaatgattccttggctgttaattgcagagttgttgtgcgttaaaaataaaagtttggaacaattagtcgaagagtgtatgagtgcctatcctgcatccggtgagataaattcaatattgtctgatccagcctcagcaatttctaaagtgcgtgcgacttatgaaaatgaagcgctggtcgttgatgaaaccgatgggattagccttgagttcaaagattggcgttttaacttacgtagttctaatactgagccagttgttagattgaatgtagaatctcgtgctaataagtcgctgatgctggaaaagacagaagagattttactattattaagatcgtagagattacttgtagttaaaaatatcagctccctgtggatctatatgtttaatataattctctgggtgctaattttagtaacgattatcaattcggtgacggttaatgacggataattttaaagtaaataacagtaattctaaaataccttctgattatggttttcctaatgttaattcatcgaaagatgagatagatttatttgagttaatggctattatttttaaatctaaaataaaaataatatccacaactttgatttttatcattatcggtttggttattacctttattctccctcaacgctggacgagcacagctgtcatcgtctcgcctggcgatgaacaaattcaagtgttagataagataacaactaatttatctgtgcttgatattaagcttgatatcagttcagattatttattgtctacttttaaacaaaactttgattctcaagatctccgtgagcaatatttagtgaatactgagtattttaagagattaatgcgagataaacctgaagatggtctggagaaaagagcattaattgaacggatagtgaatgagaatatcacatcagtcagcccgctgagagataaaggcgataatgataaggaatatcgatactacaaattatcatacagcgccatgacggctacagatgcgcgtgatttattgcaggggtatattaactacgttaacagtatagttaatgctgatgtatctagaaaaatacagcgtgctgttgatttagctaaaggtattggtactgataaatatactttggacctattgcgtgccaagaataatcaggaagttaaaattgaacgtttgaagtacgcgacttcaattgctgatgcggcgggtataaaaaagccagtttacagcagtggttccgctattagtgatgatccggatttccctattactatgggatccgatgcgctgaatcgtaaattggaaattgagaaatcggtgactgacctggcttctatcaatgctgaaattcttaaccgtagactgtatcttgataagttaaatgcgctggaaattcctaaagtggaagtggtgccatttaaatatctgcaacagccaaccgagccaaccaaaagagatgcgcctaaacgtgggctgattatgatcctgttcgcacttgcaggtttggtggggtctgtcggttttgtgttagttgatcatttcatgcgtgaacgcgagcgtgaagaagagatgctaaaactggcgaataccgataaagaataacgaaccaatactaattgatattttacattgccggattagcgctgcttgtccggtttttttttgataaaaattctgaggttagcattcatccttgttgtttgaccgcgttaaatcgacctcatacctttcccctaattatgtttccagcttgagcttatgctaaaatcctgttccttttcatcttcacactgccaatcaaaacaatgaaatttcctggtaaacgtaaatccaaacattattttccggttaatgcccgcgatccgttattacaacaaacgcaggttcaggctgaaaatgaggtcagcacctcttatatcgtcggtatcgaccaaaccctagtcgatattgaggccaaagttgatgagggatttattcagcgctacggtttgagccagggacattctttagttattgaagatgatgtggctgaggctctttatcaggagttaaccagcaacggtttgattacccatgagtttgcaggtggcaccatcggtaatacattgcataattactcggttctggctgatgaccgttctgttttacttggaactatgtgcagcaatataaagattggtagctatgcctatcgttatctgtgtaatacctcaagtcgtaccgatttaaattatttgcaggccgtggatggcgctattggccgctgttttaccttgattactgagaacggagagcggactttcgctatcagtcctggtcaaatgaatcagctacgcccagatagcattcctgaagaagtgattgcaggggcctccgctttagttctcactgcttatttagtacgttgtaaacccggtgagccaatgccagatgcaactatgcaggctatcgcgtacgctaaaaaatatcatgtgccagtggtgctgacgttgggtacaaaatacgtcattgcagataatcctcaatggtggcgagatttccttaaagaaaacgtctctattttagcgatgaatgaagatgaagcactggagcttacggggatcagcgatccattgatggccgcggatatggcgctggattgggtagatttggtgctatgtaccgccgggccaaatggcctttatatggctggctatacggaagaagcaggcaaacgccagactcaacatcctttactgccgggtactattgctgaattcaatatgtatgaatttagccgcgcaatgagaaaagagcattgtgatatgccattcaagatttactcacacatcgctccttatatgggtgggcctgagaaaattatgaatactaatggggcaggggatggggcattgtccgcagtgttacatgatatagcggccaacggttatcatcgtaataatgttcctaattcaagtaaacatgtgcgtagttacctgagctattcgtctttggcgcaggtttgtaaatatgctaatcgagtgagctatcaggtgttgaatcagcactctcctcgtctgacgcgcggtttacctgagcgagaggatagtctggaagagtcttactgggaacgttaatccaatcgctagacaacaaaaggccagcattgctggccttttgtattttaatttcggtctagtcagatcgggcaagctgcgcttttgacttcttcagtcaacgtatcgattttcagcatatttagcatgctgccggcaatctcgcgttcacccataacgacctgatcggcaccgcggtcggaaatataaaccacctcatcgtcataatgcgctctggcaataatctcaaggtctgggcgtttgaggcgcgctgcagcgacaatttcacccgcctcatagccatttggaatggttagtaacagccagcgtgcgcagtctagtcgagccaatgacatgatttctgcattggctgcgttgcccagcaccgcgttaattccttgctcacgcaaggcttcgactcgggttcgggagttttcgatgaccactaatggaacacccgctgcattgagttttgaaccgagcaggctacctacgcggccataaccgactaataaagcgtggttacatagatccactggaatttgtttttcttcttctactgcttcttccagaatttgatcttccatggtttcggttttaattagatagcgatccaacaggctaaatagcaatggattcagcatgatagaaagaatggcactggctaaaaccagattgcggccatgctccgacatcaaaccaagggagatccctaaacctgctaaaataaaggcaaactcaccgatttgcgccaaactgactgaaatagtcagtgcagtgcgtttagagtggccaaacatacgaactaacaagaaggctgcggcagatttaccgaagataatgatagccagtgaggcgataaccgctaaaggctcacgaaccagaatcatcgggtcgaatagcatgccgaccgaaacaaaaaacaggacggcaaaggcatcacgcagcggtaaagtatcctgagccgcgcggtggctaagttcggattcgtttaacaccataccggcaaagaaggcgcctagggcgaatgagacgtcaaacagccctacagcaccgtaagcgatacccagcgctaagaccagcacggccaaggtaaatagctctctggagccggtactggcggtttttgccaatatccatgggacgaggcggcggccaaccactatcatcaaggtgatgaaggcgatgactttaccaatagttatggccagttcggtgaataattggctcaaactggtattttcgctacccataacgccagcgaatgctggtaataacaccaatgttagtaccatcgccagatcttcaactatcagccagccaatggctatttgcccacgctggctgtcgatcaactgccgttcttccagtgctcgcagcaataccacggtactggcggtagacaagcaaagaccgaacaccaagcctgtgaccagatcccagcccagcatgctcgaaaggccgatacccaacaatgtggcaactgcgatttgcgctatggcaccgggaatggcaatggattttacagcgaggaggtctttaagagagaaatgcagcccaacaccgaacattaacaggataacaccgatttcagccagttctggcgctaatgacgtatcggcgacgaaacccggcgtgaatggcccggctaacacccctgcggcgagatatcccactaatggggagatgcgcaggcggtgtgccagtgtaccgaggaggaaggcgagaaccaggcctcctacaatcgttgtaatcaggggtgttgagtggtgcatccagactccttcttgttatgcgggcagtgttcattcacagcaatagcactagtttattgcatttgtgcgaactttacccgataaaaattcatattttgtcaatgaaactgaaggttggcctgtaaattgcgtaaggtggttatttatgagtgatatctcatttagacctaatagatataggtagttaagccagataatactgctatctcatccggcttaagttagtaatactgactacttttcttcaatattaggcagtaaggcagtaaatatgccaaggagtggcaggaatgcgcagatttggtaaactaactcgatactggttaaatcagcaacataaccaagtacagccgcacctaacccgcccataccgaaagctaaaccgaagaataatccggaaaccatgcctacctttccagggatcagctcttgggcataaaccagaatggcagaaaacgctgatgccagtatgacaccaatgatcactgtcaaaatgccaatccattgcagagatacgtagggtaaaataagggtaaatggtgcaacaccgaggatggagccccaaataacgtattttctcccgactctgtcccccaagggcccgccaatgatggtgcctgcggctacggcaaataagaatataaacagatgtatttgggcattttgtactgaaacaccaaacttatggattagatagaaggtgtagtagctacttatactagttaagtagaaatacttggaaaaaatcagtactagcagaatcgctaaagtggcaattatggtctttttaggcagtgtttgtaccggtgccgcttttatcggcttaccggcgaccgcgcgattttgcatttgataccatttactgacctgtaatagcactacaatggccagtaatgccgccagtgagaaccagccaacattccctttgccgtagggcgcgataaacatcgccgccagtaatgggcctaacgcactaccaaaattccctcccacctgaaacagcgattgcgccagcccgtgacgtccgccagacgccatgcgtgccacgcgggaagattcaggatgaaacacggaggaaccggtaccaaccagcgccgccgccagcaacaccaccggaaaagtagtcgcggcggccaataataagatgcccgaaagagtgaatcccataccaataggtagagaataaggctgtgggtgtttgtctgtgtagaggccaatcagcggttgcagcattgaggcagtcatctgataggtcaatgtaattaagccgatttgagtgaagctcaggctgaactctgcctgtaataaaggatagatagctaaaatcagcgattgaatcatatcgtttagtaaatgagagacgcttatcgcccctaaaatagaaaacgaagttcgctttaaggcatttcccttattttgggaggttggagggacgatgcgatcggtcatgatgagtatcagcctaattgtttttattgcgaaaggtagcgcggtaatggatacatattatgcatatcgtatgatttttactatatccaacattatttgacggatatcgcaaaaatgtgaaattcaggtgtatctaatcgagttacaatgcaaactgcatcgaggtatcaccttgattctcacagaaatcctgaactcttacgcgatctgtattcatcagactgacttttactcgacccgcttttggcgattacatggagatttgccatgcgtttttcattaaataccacagcatgcgcgttggccgtaacattggcctttgcccccggatgggccagcgcttgggaaaaagataaaacttacgacattactttactgcacactaacgatcatcacggccatttctggcaaaacgatcacggtgaatatggcctggcggcgcaaaaaaccttggtggataatattcgccaacaagtggcagcagaagggggcagcctattgttgctttccggcggagatattaataccggtgtacctgagtctgatttacaggatgcggaacccgattttcgcggtatgaatttagtgggatacgatgctatggcgatcggaaaccatgaatttgataacccgcttagcgtattacgtcagcaagaaaaatgggccactttcccgctgctctctgccaatatttatcagaagagtacccagcagcgcttatttaaaccttatgccctgtttgataagcaagggattaaaattgcggttattgggttaaccactgacgatacggctaaaattggcaatcctgagtatttcactgatattgaattccgtgtaccggcggtggaagccaaagaggtcgtcgaaaaactgcgtcaggatgaaaaaccggacattatcatcgcagccacccatatggggcattatgacaacggtaatcacggttctaatgcgccaggtgatgtagaaatggctcgtagcctgcctgcaggttatctggacatgattgtgggtggacattcgcaggatccggtttgtatgtccagcgagaatcataagcaggtagattacgttccgggtacggcttgcgcacccgatcgtcaaaatggaacctggatcgttcaggcgcatgaatggggtaaatacgtcgggcgtgcagattttaaattccgcaacggcgagctgacgttggttaactatcagctgattccggttaatctgaagaagaaagtagagaaagccgacggtaccagtgagcgcgttttctataccgaagagatcgctgaaaatccggcaatgctgaaattactcacgccgtttgaagataaaggcaaagcgcagctggaaattaaagtcggtagcgttaatggcaagctagagggcgatcgtagcaaagttcgcttccagcaaactaatatggcgcggatgctattagcggcgcaaatggagcgtgctggcgctgattttgccgtgatgagcggcggcggcgtacgtgactctatcgatgctggcgatattacttataaagatgtgctgaaagtgcagccattcggtaatacgctggtttatgtggatatgaagggcagtgaagttgagaagtatttggccgtcgtcgctaataaaaaagtggattcaggcgcctacgctcaattcgccaacgtcagcctggttgccgatggcacaggtgtcagtgatgttaaaattcaaggtaaaccgctggatgcgaataaaacctaccgcattgcaacgctgaatttcaacgcgctaggtggtgatggttatccgaaggtggatactttgccaagctacgttaataccggtttcatcgatgcggaagtcttgaagcaatatattgaaaaacactctccgctagatgctgcggcctatgagccgaagggtgagattgtttacaagtaatgagttgagttgagatgaggtgaaaataccttagggactttttatctgaacggggagtacgggtagcgctaatgcgtctatgcgtattccccatttttggctcagtggcattctgtggcagagagaagcgaggattaatcccgtttggctatatccgcgaataccgcattgagcaactggcctaaatctgctggagctagctctatatccagcccgcgtttgccgccggaaacgaacatagtggcatattgctgcgcctgactgtcgatgaccgtgggtaaacgttttttctgtcctaacgggctaattcctccgactaaataaccggttactcgctgcgccagctgtggatcggccatatctgcttttttcgctcctaaggctcgggcaactttttttaaatccaattgagtggcgaccggagtgacggcaacggctaagtttttggcttctccattcaggcaaaccagcagagttttataaacttgccgggcatctagccctaattttctgacagcttcatcaccaaaattcgtttctgcactgtcgtgttcgtaagggtgaagagtaaaggcgattttttgcttttccagcagaatgacggcaggagtcatgattttcgtccactataaaaataataccagttaatcataacaggactatcgttgcagctaatccttatctttttagtatcttacgcttaatgcagcttagtaagaaaaaaattaacttaatagaatcaaaattatgaaattgtattcctcaataataatgaatcccagttgcttataggatccgcgggttgctaccctgatatggcaaattggttgaccgtcaggaaagccggcttgctacgtaataactaaaacaatgaaaattcctctttgactggccaatagcgatattggccatttttttatccatgagctggctgcattaaagccggtaaatttccgtcgccatataaatgtaaagcgcccacagcaaccagataatgccccgccggtaaggcagacagttgtttttgccattgctggttacgttgcaccattaatagctcatataaatcatcgctaaaagtcgttgtcagtttagccaggctaccgcagggttgtcgctctaaccaccaactgatcatggtttgtaacatgcgggcgttggtgtgccagtgagccagagtatcttttaacagccccattccgctgtcaggcagggtttccagtagggaaagctgcatttgcgagccttcgagttcgataatatttttccgctgcgctttggctgcattcaataattggtaatcaataccgtattccccgcgcagccctagattttgcgcctgacgcgcctgtagcatcagcgcgatttgccaggccggaagggtggccagagcgaacgggtcggtttttaattcttcacagcgctgaacgagctgttggtaatctgtttcagagagtcggtcgaccaacgggagctcatcgggatagtgagcgaaaggggatccaccttgggtaatatcggcctcaacgattaacgcatcggcttttatcaggcgatccaacagaatatccggtagcgggaacatgccttcggttcccatatggatactccctaccagatggaagtgacgtgagccgggcagttgtaaatcgatacccggatacggataactcggcggagaaaggatgccaagaaaggtggctagctgacgtaaaagttgacccataccggtgtgcgtcctgatttagcatttctcccatgctaaacgctaaatggcgcacaagaaagggttgtgcgccactgggttaggacttcgtttattgtttaggtttaaaacgtaacaaacggttggcattactgacgacggtgattgaggacaacgccattgcagcccccgcgaccaccgggcttaacaacgttccggtgaacggatacaaaatacctgccgcgattggaatccccagcgcgttatagaaaaatgcgccgagcaggttttgtttcatattgcgtaatgtggctttggatagctctacggcatcggcaacgccgtgcagactatggcgcataagcgtaattgccgcagtttctatcgcaatatcgctgccgccgcccatagcaatacctacatcggcctgagccagcgcgggcgcatcgttaataccatctccgaccatcgcgactttgttacctgcagcctgtaactgcttaatcgcatcggctttgccatcgggcagcactccggcaatcacttgatcaataccggcctctttggcaatagcattagcagtaatcgggttatcacctgtcagcatcactaatttgtagccttgttgatgcagacgttgcaatgctgagacactatcgctgcgtaacggatctcggatggagaacagcgccgcgacttgaccattggccgccagaataaccggcgtggcacccgtttccgcctgttgccgcattaagtcgcttaactcaagggtatcaatctcttgttgtttcagtagtgcattgttccctaatagcagtgatgctccttcaacatcaccgctgacgcctaaaccgcgcagggtacggaactggctggtggcaggcagagtcaggcctttggcacgttgcaaaattgcctgcgctaacggatggtttgagcctgtttccagcgcagccgcccagccaagcgcctgttgttccgtaatcccgttaaaggtatggatagcgacaacctgcggacggccttcggtcaatgtaccggttttatcaaataccaacgtattcaagccgctggcctgctgaagcgcatcggcatctcgcaccagtacgccaaactcagcggcacgaccaacgccagaaatgatcgacatcggcgtggctaatcccagcgcgcaagggcaagcgatgatcagcaccgtggtggccaccaccaaggtatatacaatttggggctgagggccgaagaagtaccaaatcacaccggcaatcaaggcgatagccacgacggttggaacaaatactgcagagattctatcggctaactggccaatttccggcttactactttgcgcctgacgtactagcttgataatccgcgccagcgtagtctggctgccaatggcgttagcgcggaacagaaccgatccatcctgcactgaggttccggcgtgtactttatctccagcggatttctgctgcggaatcggttcgccggtgagcatggcttcgtccatccacacttccccctgcacaatttcgccgtcaacgggaactcggtcaccggtggtcaaacggagggtcattcccagctgtacgtcagccagcgggatttgtttctcaccgtcctcagtcacaacccgcgcggttggcggtgccagatccagcaaacgttccaacgcattggacgaacgttgtctggcgcgctgttccatcgcatgtcccagattgattaaaccgataatcatggcgctggcttcgtaataaagatgccgggcctccatcgggaatacatcgggccagatattgacggtaatcgagtaaatccaggcggcaccggtgcctaatgccaccagcgtatccatagtggcgctgccgtttttcaggctgacccaagcgttgcgatagaaatgtccgccggcaaagatcatgaccaacagcgtcaatacaccgatcaccagccacggggtttgggtttccggcgtgagcgtcatactgccgccgaataagccccatgccatcaatggaatacctaataatagccccagcgcggcctgccattggaaacgtttcatattggcctgagacatttcctgctggcgttcccgccgtttagcttcgtcttcgataatctcagcgccatagcccgctttttctactgcggcgatcagcgcgctattatccggagaaccggtcaccagtgcgctacgttcagctagattcactcgcgcgatctgcacgccatccacgctttgcaacgctttttgtactttagaaacgcagctggcgcagctcatcccggttaacaatagctgcacgctatccggatcgtcgccgtctgacggagcggttgcgggagtattttcagttgccggaagagaagaggccgctgccaaagattccggcgcagattgcgtagcatgtgccagcggctcagtttttgggacggcgttttcctgcgccagcgtggcctgataaccggcattttccacggcggcaatcagtgcgtttgcgtcgactcgaccgtaaactttggcgttggaggtggatacatcggcggcgatgactcccggaacggcttccagcgcttgacgtgtcgttgccgcacagtgcatacaggttaagccggaaagctgtagctctacgtccggttgttgtactggctccgactgatagcctgcctgttttaccgtttcgatcagtgcctgtatgtcggcctcaccgaccactttcgcatagtgaacgttaacctgagcctgttcgacgtcaggccggtcttccagcgctttttgcacccgtccggcacatttcatgcaggttaaaccctgcaaagcaagcagcgtagtgtgtgacatgattaactccttaaagagtaaaaacttatccttttgactgcggggataagtttagtcggtattaagccctttaccttgatgccgatcttctggcaggcaacaaggttaatttctcttgaccgacgtgactattttaactacttatggaggttaaaccttccagcaagggtaaggtcaagggagaaatatgaatatcagcgatgtggccaaaaagaccggtttgaccagcaaagcgattcgcttttacgaagaaaaaaagcttgtaactccgcctatccgtaccgataacggttatcgcagctatgatgcccgtcatattgaagaattgactttgctgcgacaggcgcgccaggtgggatttactctggatgaatgtcgtgaattattggcgctgttccataatccggatcgccatagtgcggacgtcaaagccgcgacgttacagaaagtggctgaaatagaacggcatattcaggatttgaatcagatgcgtttacgcttactggcgctagcggcagaatgccccggcgacgagggggcggattgcccgattatcaataatctggcgggttgttgtcaccgcgaggagaaaggatagagataagaagcccacggtcgcaaaccgaacgtgggcgataaactagcgtattattgcacggacattcaaggtgttaccttcaatggagaccacttcgacttccgtgcccacgcttaattcttcagaactatggatacgccagctgctgtcgccgactttcatccgaccatagccatccagtgtcggttccgtcagcgttgcccgcaggccaaccatttgatgatcccgctggttaagcatggcaggctgcggtttgactcgtttactcagccaataccaccacaaaatggcggcgatgacggtgagaacggcaaagagtacgccttgccattcccagcttaacggcaacatccagaccaacaggccaaccagtacagcggcaattccactccataacagataaccgctggcacccaacatttccgcggctaataacaagccgccgagtgatagccaaaaccaatttgggtttgctgcaatctgtttaagcatggttatttacctcggctggttttgctctcgccaatcagttcagcgataccgccaatcgcgcccatcaggctgctggcatccagtggcatcatcacgactttactgttgttggctgagccgatgtgttgcagcgcatcggtgtatttctgcgccacaaagtagttaatcgcctgaatatcaccggcggcgatagcttcagaaaccattttagttgcctgagcttcggcttctgcggcacgttcacgggcttctgcttgcaggaaggcggattgacgttccccctcggctttcagaatctgagattgtttttcaccttctgcacgcagaattgctgcctgacgcacgccttcggcttccaaaatatccgcacgcttggttcgctcggctttcatctgggcgttcatggccgaaattagttcggtcggcggacgtacatcgcggatttcaatacgggtaattttgatgccccaagggttggtggcttcatcaacaatatggagtaaacggctgttgatgttatcgcgctgggacagcatttcatccaattccatagagccaagcacggtacggaagttggtcatggtcaggttaacaatcgccagttccaggttgctgacctcataagccgctttgaccgggtcaataacctgaataaagcagactgcatcaatggcaacgttggcgttatcgcgggaaatgatttcctgtgaaggaatatccagaacttgttccatcatgttgattttacggccaatgcggtccataaacgggacgacgatgttcaggcccggcatcagagttttggtatagcggccaaagcgctcaaccgtccactggaaaccctgtgggacaattttgattgcggagaacaccacaaccagcgcaacgacgataataatcgggataaccgtaaacatagttaacttcctgtcggtcaatgaatattgtttcataatattacgcgacgacaggctaaaagactaactaaagggaggtaaatacatgtaaggaatcattctgctatcgaaaaagcagaaaaaaacctgaaaagtgaataagaaagggcgcgggaaagatcccgcgcagagtagctaaaatgggcttagtacagcagagagtagagctggcggcggtatttaccggccagagtatcgccggtgccaagggcggccagaatatccatcaaggttttgcgagcgttgccgttcgctgctgccagatcttttttcagatggctcatcaacagttccagtgcttcttcgttacggccaacctgatgcagttgcagtgctagctgtaccgccagctcgacgttttcaggctgctcggccagctgttgctgtaattgctgaatttccggcgtatctgccgcctgcttgagtaattctatctgtgcaatcaggccctgatagcgagtgtcccgatcttgcagtgggatagtttctaataccgcttccgcatcgtcactacgattcagttgaatttgtacttcagccagctgcaagccgatttcgccgttgtattggctaagctgccaggcatctttcagtagcggaagggcttcttgcgctttgccatcggcgataagctgcgccgcttctgctgcttttagttcttccggtttaggtaatacgcgttgtaacagttcgcggataacttcttccggttgaggtccctggaagccgtcaaccggctggccgtctttaaacagatagaccgcaggaatagaccgcaggccgaattgtgaggcaaccatttgttgagcgtcacaatctactttggccagaatgaactgaccggcgtattcggcggctaatttgtctaaaaccggcgttaattgcaggcagtgctggctacgttccgaccagaaatagaacagaaccggctgcgccatggactgttccagggtttgatgtaggttagcttcggtaatatcgataactgttggtgctagcatgactttattctctcatccgttttagcgatagatgggggcagaatatccggcttcaaccctctatcgcggtttatcggttatcaggcgttgccccgcaagacgcaatccagcaagcggcccggtaaaatgcgacgcagcacggtaacagcgtgtgccaccagtgtgaccggatagcgcaactttggccgcggcgcttctaatgcatgacgtaatttgggcaaaatcgcttcaggtggcagggtgaagcgtttggcgatacccggattattcactggtttgtcagcctgggtctgattaacgttttgtgtgaaatgagtgctaatcggccccggttcaatcaaactgacaaaaatcccgctgccgtttagctccatccgtaaggcatctgaccaggcttccagcgcatatttgctggcggcgtaagcgccccgacccggcgttgaaatcaaccccatcaccgaactggtttgaataatccggccttcgccgtggggcaacatggcaggcagcagtaattgggtgagttggtgggtgccaaatagattggtggaaaactgccgttccatttgttggcgcgaaatggtgtctagcgggccgtataagccatagccgccgttgttgaataaaccgtacagtcgcccgccggttagctcgataacctgtgccgcggcgcgctcgacgctggtgctgtcatccagatccagctcaataccttccagccccaattgggacatgttttctacgtcctcaggtttccgacaggcagccaaaacccgatagcctctgttacgcagatcctgcgccgctaccaaaccaattccgctcgagcatccggtgattaaaaccgctttttgcataactttacctactgaatgaacctatttgctcagactaatggtttactaagaacttatattatcagatagctaatatcttatattaataagtgcagcgttattctgacttgcctttttggataaaaggcgtgagttgctttgacatccagtcggcaataaacggctgcgcctcggcgttaggatgcaagctatcgtcctgcatccattcaggttttaccgctacctgctccataaagaaaggcagtagcggaatttcggcctgctgtgccaatgtcggatacagtgcggcgaatgactcggtatagcggcgaccataattaggtggaatgcggatttgcattaacaatggttgtgcctcggcctctttaaccagactgatgatttgcgccaaatcccgctgaatatcctgcgggggaaatccgcgcagcccgtcattggcacctaattcaatcaatacccagcggggctgatgttgtgccaacagtgcgggaagccttgccaggccttgcgcggcggtgtcgccactgatactggcgttgacgactttaggatgagcaggcagcgtttgccattgcttgtccagacgggtagcccaggcttcggcaatgggtaggcgataaccggcgcttaaactgtcgcccaaaatcaataatgtatcgtttgcagtagcgcgcagactgaataatcccaacagtagaaggaagggaagatgccagcggaaaacgttcttgaagttcatcatcttaataaacacgttggtcagggtgagcatcagctttccatccttactggagttgagctggttgtcaaacccgcacagacaattgccctgattggtgagtctggctccggtaaatcgaccctgctagggattctggcaggtttggatgatggcagcagcggcgaagtcagcctgttggggcagtctttgacagcaatggatgaggaagggcgcgcgcaagtacgggcgaaaaacgtcggatttgttttccagtcatttatgctagtgccaacgctgaacacgctggaaaacgttcagttgcctgcgttattgcgtggggaaagcgatcgtcagagcaaagctcaagccacggaattattgcagcaattggggctgggggaacgtctgcatcatctgcctgctcagctttccggtggagaacagcaacgcgtcgcactggctcgggcatttagcggtcgcccgcgggtattgtttgccgatgaacccacgggaaatctggatcgtcaaaccggcgaccgcatcgccgatctgttgttttctctgaatcgagattacgacaccacgctgattctggtcacgcatgatgaacaactggcggcgcgctgccagcggcgtttgcgcttgcgggatggcaagctgtgggaggaagcatgatttggcgttggttttggcgggaatggcgctcgccatccttattaattgtctggttagcgttgactctggccgtcgcctgcgtattggcgttgggcagcatcagcgaccgaatggagaagggcctcagccagcaaagccgtgattttctggcgggtgatcgggtattgagcgcttctcgtccggtatcagagggatggttgttagatgcggaacagcaagggctaactctcagtcgccaactgtcgtttaccaccatgacttacgccggtgatagaccgcaattggcggatgtaaaagctactgacagcgcttatccgttgtacggaacgctgaaaacccggccggagaatgcgcggctggaaccgggcaccgtgttggtggctccgcggctgctaactttattgggtgttaacgttggcgataggctggaggtgggggatgcgtcgctgcgtattgtcggggaagtgctggaggaaccagacgccggattcaatcctttccagactgcgccgcgcattctgattaatctggccgatgtggaaaaaaccggcgcagtgcagccgggtagccgtttgacctatcgctatatgtttgccggctcgccggataacattcagcgcttcggcgatcagataaaaccggaattacagcccgatcaacgctggtacggtttgcaggaatcgggtggcgcactggggaaatccttgcagcgctcgcagcaatttttactgttatcggcgttgctgacgctgttactttccattgccgccgttgcggtcgccatggggcattattgccgtagccgctatgatttggtggcggtgctgaaaacgttgggggcgggcaaggccgcgctgagaaagctgattgtcggccaatggatatcggtactgacgctggcggcattgtgcggtagcgcgatagggctgctatttgaacgactgctgatttccatgttggcgccagtgctgcctgctgcattacccgccgccggactctggccgtggctgtggtccatcggctccctgattctgatttccctgctggtgggattgcgcccctatcgtcagttattagcgactcagccgttacgagtgttgcgccgggatgtggcggcaaatgtctggccgctgcgctatttcatcccgttaatgttattagcggtgatcggagttctggcgctgttaatgggcggcaataccttgctgtgggcgattttgggcggcttgctggtgctgtcactgttattgggctgtatcggctggggcagcctattattgctgcgtcgactgacggtgacgcgcttgccactgcgtttggcgatcaatcgtctactgcgtcagccttggatgacattgacccaactggcagcattttcgctgtcgtttatgttgctggcgctgctattggtcctgcgcggtgatctgctggatcgctggcagcagcaattaccgccggacagccccaactatttcctgttgaatatgaccaaggagcaggtgccgcaggtcagtactttcctcaatcaacaccagattatgccaaccacgttctatccgattgtgcgggtgcgcatgacggaaattaaccagcagcaagcgaccgagcgggtgcatgaaaacgatccgggaggagaggcggtcaaccgggagcttaatctgacctggttaccggatttaccggctcataatcagttaactgacgggaagtggccgccaaaagcggatgaagtatcgatggagcagggcgtagccgagcggcttggtatcaagctgggcgacaccttaaccttcagcggcgatacgcagtcgttttcggccaaagtgagcagtattcgcaaagtagattgggaaagtttgcggcctaacttctactttattttcccgccgggagccttggataaacagccgcaaacctggctaaccagcttccgttataacggtaacgagcagttattgactcaattgaaccgccagttccctacgttaagcctgctggatataggctcgatgttgaaacaggtcggtcaggtattgcagcaggtgagtcgggcgttggaagttatggtggtgctggtcatgatctgtggcactttgctgttattagcgcaggtgcaggtgggaatgcgccagcggcgccaggaactgatggtttatcggactttaggcgcggggaagcgcttgctatgggggacgttatggtgcgaatttgccctgctagggctggtggcgggcatggccgccgctataggtgccgaagcttcactgtgggcgttgcaacggctggtatttgatttcccgtggcagcctaattggatattgtggtggatgttgccgttgcttggcgcactgttattgtctttatgtggcagttggctgggcgctcgtctgctgcgcggaaaggctttgttccgcagctacgaaggttaacaaccaaggctaaatatcggttatcagcattggttagatgataaagaaaagggcagccattggctgccctgattctactaactgactctgcgataaaaccgaggcgtttatggcatctccgttattgcttatcccagttttttctgcgcccagcgcagggcgctttgatattcatttggtagcaagggtgacaactcgttcaacgtttcggccaattgtttttccgccggatcggtgagattcaaatgcccgactttacgcccatcgcgcacttctttttcgtaccaatgcagatgaaccagaggctgtgaaagccatgccaaattaaccgcagtgccgatgagattcaccatgaccgaaggggtgctaaccaccggttttggcagtggtaaatccagaatagcgcgcagatgcaattcgaactggctgatggacgcgccattttgcgtccagtgaccgctgttgtgtacgcggggagccagttcgttgatcagcaggttgtcgccgacgataaagcattccatcgccatcacgccgacataacccagctcattcataatggcggacaacatgctttctgcctgagcctgcaatttggcatctggctgcggtaacgctacgctgatacgtaaaatgccgtcttcatgcagattatgggttagcggataaaataccgtttccccatcatggctacgtgcgccaatcagagaaacttcgccagaaaaatgaatgccttgctcgacgatgcactcaccgtaggcgtccgcaggcaggctatcttgctcgccgggacgtaaacgccactgcccacgtccgtcataaccgccgacgcgacgtttaacaatcgccagctcacccagagaagcaaacacctgcggccactgttcggcattagcgagtaattgccaaggcgcggtggctaaattcaggctatccaacaattgcttttgcgtcaggcgatcggccaaacgcgggaaaatatctcggttaacgaaggcgttgtgagtagccaattcgcgggtcagtgcggtttccggccagcgctcaatttcagcggtaatcacactattctgataaggcacggcttcgggttctgcgtccaatcctactggataaacggcgattcccagcggctctccggcctgacgcagcatgcgccccaactgcccgttacctaatacgcaaaccggcttcatgcatcctcccgcggatcgggattattcagcacttcatcagtttggttttgacgccacgcagccagacgccctgcgagagttttatcgtgcagcgctaaaatctgtgctgccagcagcgccgcgttggctgcgcctgctttgccaatcgccagcgtccccacagggataccgcgcggcatttgcacaatggaataaaggctgtctacgccgctcagcgctgcgctttgtaccggcacgcccagcaccggcaccagcgttttcgccgccagcatacccggaaggtgcgctgcgccaccggcaccggcaatgatcacatccagtccattagcgtctgcctgttcggcaaaactgaataatttatccggggtacgatgagcggaaaccacttccacatggaaagggacatccaattcggtgagcacgtcagcagcgaactgcagggtggcccagtcacttttagaccccataactattgcgattttaaccccggctgtgatagccgaatcgaggttggctcccatgggtgtaaagctcctgtgattgtgcaaacgtcggccagagcgaattgtgtctggcgaagagggcgtagagcataccatgagccacaggcaaggaaaacggttgcgtagctggtttttgtacgaaaaagcaggatttttcaggatttggcagtaaggtttaaaacgggaattcgatcagctcgatagcttcaggagtgacgcaaatcatcgatccttccacatgccaggcacccaatacggcgcgatgtacggttttatctgccagtttaaggggatgaatcgctggacgatgtgtatgaccgtgaatcatccactccacgccattgcgttggaaagcatcaatcacagctgcgttattcacatccataatggcttcggatttgtctttattattctgttggctgtttttccgcatcgaagcggcaatgcgtaaacgccaggaaagaggtaaggacaggaataaccattggataatgggattgtgaacccggcgacgaaaatgctgataatccgcatcatctgtgcataacgtatcgccatgcaggattaaaattttgcgaccatacagttcgagagtttgttcttctggcagcagcatcataccgctttcggcagcaaaacgttttccaactaaaaaatcacggttgccgtgaatgaagtagcagggaattccccgatggtgcaagtctttcagggcactggcgacctgacgatacagcggcagcggatcgtcatcaccaatccacgcttcaaatagatcgcctaggatatataaagcgttggcgtgaatggcttcgcgctgtaaaaaacgcagaaaaccggcagtaattgccggttcctgaacgctaagatgcaaatctgctataaaaagcgtgcgcattccgtcgcaattactcgctaacggtaacgcttttgatgatcacatcttcttttggaacgtcctgatgcatgccgctacggccggttgcaacgcttttgattttatcaacaacgtccataccttcgaccacttcagcgaatacgcagtagccccagccgtcagcgcgctctgaacggaagttcaggaagtcgttgtcagctacgttaatgaagaattgagcggtagcagagtgcggatcgttagtccgcgccattgccaaagtaccacgggtgtttttcaggccgttgttcgcttcgttcttgatttgcgcacctgtttctttctggttcatgccaggctcaaaaccgccgccctgaatcatgaaaccatcgataacacggtggaaaatagtgttgtcgtagaaacctttacggcagtaattcaggaagttttcaacggtagccggcgctttgtcagcgaaagtattgatgacgatgtcgccgtgattagtatgaaaagtaaccataataatattcctgctagtgtaatatgtggaatcacaaagtgagtcgctactctttagacggctcttataacacatctgccggattgagtcagtattcgcgcctttccaacccgctctggccaggagaggcagaaaagcattagtggggcaatgtggctgattaataaagctatttataacccaataaattcaccgctttcatccgcgctttttatcatcacctttaaacgtcaaaccgcttaaaattgcgttattcagtaggttttaccgatggctgaccttgcaatgcaataaggatcgcgtttcaatatatccttgggttatttaagcgcccatttttggtaatatcctgtttatattcacgcgtacgcgcctagcaaaaaaccacggaatgtcccgatgctaaagatttttaatacactgagtcgccaaaaagaggaattcaagcctattcatgccgggaaagttggcatgtacgtgtgcgggatcaccatctatgacctgtgtcacattgggcatggtcgtacttttgttgccttcgatgttgttgcgcgttatctgcgttatttaggctattctctgacttatgtccggaatgtcaccgacgttgacgacaaaatcattaaacgcgcggcagaaaataatgaaacctgcgatcagctgacttcccgcatgttggctgaaatgcataaagattttgatgcgctgaaccttcagcgcccggatttggagccgcgagccactcaccatatcactgaaatcattgaactggcgcagcgcctgatcgagcgtgaccatgcctacgtagcgtcaaacggcgatgtgatgttcgcggtagatagcgatccggattacggtttgttgtctcgtcaggatttggaacagcttcaggctggcgcacgggtcgaaattgccgatgtgaaacgtaatccaatggatttcgtgctgtggaaaatgtccaagccgggtgagccaagctgggaatcaccttgggggccggggcgtccgggctggcacattgaatgttccgcgatgaacggcaagcagttgggcgcgcattttgatattcacggcggcggttctgatctgatgttcccgcaccatgaaaatgaaattgctcagtctacctgcgcccatgatggcccttacgtcaactactggatgcattccggtatggtgatgatcgacaaagaaaaaatgtcgaaatcgttgaacaacttcttcactattcgcgatgttttggcgtattacgatgcggaaaccgtgcgctacttcctgatgtctggacactatcgcagccaattgaactacagcgaagaaaatctgaaacaggctcgcgcctctctggagcgtttgtacaccgctttgcgtggcaccgatgcaaacgctacgccagccggcggagctgagtttgaagcccgtttccgtgaagctatggacgatgattttaatacaccggaagcctattctgttctgtttgatatagctcgtgaagtcaatcgtctgaaagcggaagatatggcagcggccaacggcttggcggcagagctacgcaaactggcgcacgttctcggattattggagcaagatccggagcaattcctgcaaagtggcgcacaggctgatgatgatgaagtgaccaaaattgaagcgctgattaaacaacggaacgatgctcgtgccagtaaagactgggcaatggcagattcagctcgcgatcagctcaacgaaatgggtatcgtgctggaagatgggccgcagggcaccagttggcgtcgtaagtagcagataagtggttttgatttgatgtaaacggtgggttcccatctttgaagatgtggaatcttgctgaataaccttgagtggcggtaataaaaatatcaaagaaaacattgcggtgctgatagctatcagtaaccgcaatgctctttatgaagcttaggctttaacctgtacggtcatcccctgaaactccacgatttggtctgccagaattttgcagcgcttgcgcgtttctacttttccgtcaactttgaccagaccatcggcaatcaccatttttgctgatgcgccgctgtcgttccacccttgaaacttcagcagatcgcacagttcaacatgagggtgattttccaactgaaaaatttccatgactatcctttaaatcaatttgtgttgatgtcgtgatattcctcgcaggcttgcaaggtattttgaatcagagttgctacggtcattggcccgacaccgccgggaaccggagtgatccagccagcgcgttcaacggcaacatcaaactctacgtcacccactactttaccactttccagacggttgataccgacatcaatgacgattgcgcccggtttaatccagtcacccggaataaagcccggtttaccgaccgcaaccaccagcaaatcggcacgttcgacgtgtgaacgcagatcctgagtaaagcggtgagtgacggtagtggtacagcccgccagcagtagctccaggctcataggacgaccgacgatgttggatgcgccaactacaacggcattcaggccgtaggtgttgatgccgctacgctcaagcagagtaacgatgccgcgtggcgtacaagggcggagttttggcgcacgctggcacaggcggcctacgttgtaaggatggaatccgtccacgtccttatcaggattaatgcgttccagtacttttacgttgtcgataccggcaggcaacggcaattgaaccaaaatgccgtcaatctctggatcttggttcagcttatcaatcaaagccagcagttcggcttctgaagtgctggcgggcatatcgtatgaacgagaaaggaatcccacttcttcacaggctttgcgcttactgccgacataaatctgtgaggccgggttttcaccaaccaacactaccgcaaggcctggggcgcgtttacctgccgccaaacgctgttgaaccagtgcagcaacttcagttctaacttgctgcgcaatcgttttaccgtcaataatttttgctgacatcagtggaggagtccatcaattaaaaaagcgggaatccctctattttgtcagaagcgaggcgtgctgtcaggcgtagaataacgaataaatgtacaggtgagtggttgtaaggcgaaaacccattgactcgcgggtgtctgcccgtataatccaactccgcaactgaccatccgcagcaagtattctgtggaaaatcaacaacgcgcccttagctcagttggatagagcaacggccttctaagccgtaggtcacaggttcgagccctgtagggcgtaccattttcaagtcaatgcacctctactgaattcgcttcttctcctttatactccctgaaattaatggatttttctgtcccgagctctaccgaggtcaactcagttatacccaaatcaagtggtatctgggggcctttgagggggctcatcgtaatggtctaatcattccggacactttgttagagatataatgagcaacactaacgaggtgagaatgcgaaaaaaatcatttactcatgagtttaaacaagagtgcgtcaatctggttcttcaacataagtacccggtgaatcagcctgccgaaacaatgaatattggcctttcaacctttcaaccttacaacctttcaaccttacaaccttacaacctttcaaccttacaacgctggctaaggcagtatcgcggagagatccgcggaaacacaccgatagccagtgctataacaccggaacaacagcgaatacaagaacttgaaaagcaggtacggcagttgcagagcgacaatgacctgttaaaaaaggcttcggccttctgtaagtatcccagctttagttccacacactttttgagatttccggtttctcagccatcagccgatattcttccggcgtcagattattcagggattcatgaggccgctcactgttgtattcattcagccagcgctccgttatttcccgtgcttcattcagtgttctgaacagataaaaatccagtatttcggtccggtacgttcggttaaaccgttcgataaacgcgttctgtgttggtttgccgggcttgataaattccagcatcacgccatggtcttcagcccattgtgccagcgccagtgatatcaattccggcccgttatccatccgcatcttcagcggatagccacggtttgccgctattctgtccagcacccgcacaatgcgctgcgccggaatattcaggtcaatttcgatagccagagcctcgcggttaaaatcatccacgacgttgaaagtccgaaaacgtcggccacatgtcagcgcgtcgtgcataaaatcaatcgaccagctttggttgagggcttccggcgtggccagcggcgccggattacgcaccggcaggcgttgtttccctttacgacgaaaattcagttttagcagacagtaaatccggtgtatgcgtttgtggttccaggcgtatccctgcctgcgaagcacctgaaaaagcttcttaaatccatagcggggatagcgttcagccgcctcagtcagcctctggatcaccggttcatcacgtcgtgtattcggttgataacgaaacaccgtcctgctcagcgataacgtcctgcatgcctgrcgtatgctcatcgtaaactgcgtggtcagatagttgacgagctcacgctttatcgctggttttaaagctttttttcgatgacgtctttcagcgcacggcattccagactcaggtcggcaaacatctgcttcagacggcgattctcgtcttctagatctttgatttttttgatatcagcggcttccatcccgccatatttcgccttccaattgtaatagctggcttcggaaatagcagcctcgcggcacacatctttgacggtcctacccgcttcgacggacttcagtacggcgatgatctggtgctcggtaaatcggatcttgcgcataaggatctcctcaggtgacatcatcagtatgtcggaagatctctaaaagtgaatgggccgtttaagcgggatacttacacttcttcgccatggaaatgaacaacgacaaaaagtcgcggtgaaactgaagaaggccggcgcaaacatccaacaggtatgccgctgcttatcgctcacgcgcagcgtgttttatgcccgtagtcgtcggccagtgatcaagcccgatgttctgatgttgcacgcggcggctaagcatgttcacactgaaatggatgccacatatggcagccggcgcatatgcatcgagttacgggagcagggttttaacgtgggcagataccgcgttcggcagataatgaaaaccttattactgattgctaaatgccccgggcgtcatcgctattcacgcggcgaaaaatccgctgtcgtggctgctaatctgttgaaccggcagtgtaatccagaaacattgaatacttggtggtcaggtgatatcacctatctgcgtaccgctcagggttggttatattgggctatcgtgatggacctatgttcaagaaaaatagtgagttggcccttctcagacaagccggacagcgacttgactgttcgggccttaaggctggcggtcaataaacgacgacccacagggtctgtggtgctctatagcgttcaaagggcacaatataccagcgcccagttccagtgctgtcaacaggaactggatgttacaggtacccctgaccacactcaacgccaacaaaccagaagaagaaaggatgactatcaggcagagcaagtatctgaataacctaatggagtaggatcaccggaatatcaaacgccgaacacggccgatgctgggatttaaatcatttcggcgggcgcagaggcatcgagttggtacagatgatacgtaaagagcaacttcagcatcccgcgggtgcgcatttatcaccggcggaataattttatttgttggcagcctaaaatatcggcagcgcaacttttgctgactctgctctgttaatgctacagaaccttttttaccagcaatgcctgaagcatggctcatggggtagcgtctgattgttgttacccccaatcactttgaaccctgattcgttcagtgttctcatcagataatcctagaaatgtactaactcctcatgatgcgtgagccagcactgctggtcagggcagagcgtctggtggctgcgggcatatccgggaagggaatgaagtcgccataggtgttacgccacagaacaccgtcttccacctgccgcagttcactctcccagaacaggctccagcctcgccccaacacatcaatttcagttgcggtgttggggggcatatttagcgcttaaataatgggatgaagtgtggggattgctcactatggtaatgcgaatgagttttaataatggtatatcttataattagaaaatctttaggtttctttacaaataaataaaaacgcgatcgagatcaaatacttggaacaccaaaaatatcatctttgtgttatcaatttaacgcagggtgttatatgaaaattaaagacttttttgttatgaccacgccttcaagacgtcgatatggtgtcgctttctttgttggtattattgctggcataatgtcagcttttgtaaagtggggcgcagaggtcccgttgccacctcgtacattctccggcggacgagacgaatttaatcccccttatttatttctgagagattatctcggtattgacccaactcaggctgtctatcatttctctgagcacatcattaatccggtgcatgtaactcatatcattttctctctggtttttgcgatcggttattgtttggtcgccgaagtctttcctaaagttaaattatggcagggggtaatggcgggtattattgcaacggttgccgtgcactggattagtttccctctattgggattaactccaccgctatcaggtctaccttttgatgaatatctctcagaattagttgggcatattttctggttctgggctattgaaatgatccgccgtgatttaagaaaccggataacccatgagcctgatgcggaagtaccgctcgattcacctttccgctaaatgttgctcgaggatcttaacccacactttgttgtgggtttttttacgccttgaaattgtccggtataaacgatcgtctacgggtacacatgcataattccattgtattggataagatttttattagaagaggtttaaagcatgaattctagggaggaaaagacggttaaagctgaggcgttggggagatcggctacgttgcaggacgaaagcaacttccgtcctgcattgaaacttaaatatatattaagcttcgattggcgcacgccagtcgtcagcacctgaagtgccagcggtagtgtgttcccagttgattttacgatatgacagagatacgcgcactaattgagtaaactcggttttagtgctgtcttggcaatgtggcattttgcaatcgatatcaataatagtggcatcttctaattcagttgtgaagaagtgctcttgtttaccttccacagaagtgcggtaccattttaattctactttaggcaacatttcacctgaagccagtgcgttataaagcaaaggaacagccttgtttaatgcaactgtaaaacggaatggtttatgagcacgttgaccggacggctgtccagattgtggatctgtaggcacggtaacaacgtgttcaaattcctgtaccagcatttcatcttcatgaccctgtacaaatatattaccaacagattcagcagtgaatgaacctgctgtaatgttgccttgtgtcttaccggtaatggagatatagcatggagttggcattgagaatatcctataaaagtgagttggtattgaaccctaaatgacgctaataacctgtaattgaatattccaggtgccggttattgcattgtatacacagagcaagaccttatcgtcgacgccactataatcagccaaaagcaaatctccaaacctcacaatgaggatagttaattagtaaaaacaccattagtttaaaaaattaaaataattgcaaaatcagaataatcatctttatggtctatttttttagatctaattttgtgcgaacttatttattcaaaaaaataaataatttacaactcattgttattgatgttttttgtaaattaaatttaaaaaaatatttgatcatgtgtgtattgagacgaacttcaaataaataatgatggatagttacctagttattttttctatggactttttgcggtgaaataagggaaaatcccttggagatgcattttttcccaatcatttaattaatttttgcatcatgtggaaataacctgcctgacccgatcagcgctgagattaaggaatatccaagaaaattttggttaagtattcctgtgcgtcgcattgactcatcttgagaaaaataagttatttcttaaattcttaggataattcttggatttataaccgaaaggtaatgtggatatgagtaaggataattcgagtagtgtcgctcctaaggaaaggatcaacattaaatatgtcccgaataccggtgaccaggttgcggaagttgaattaccgttaaatctgatggtagtcggcgatctgaaaggggttagagaagatacgccaattgaagaacggcaggttgtttctattaacaaaaataacttcaattccgtaatgaatgaagctgggattaatcttacttttaacgttccgaatcgtttagatggtaacggcgaagaagatatgccggtgacattgcctattaattcacttagcgatttctcgccggataatgtggccaagaaagttcctgaactgaataagttattagaactgcgtgaagcattagtggcgttaaaaggcccgcttggaaacatccctgcattccgttcacgtctgcaagacttgctttctaatcaaagcgtccgtgaacagcttctgaaagagctggaaatacttaaccaaaagtaattggtctggatacaaggaattttaagtatgtctgtacatgaagagaacgcagccacgcttgcaccggcagcgagtaccacttccttgcttgatgagattatgtctcaagcacgcatggcaccggaaaacgacggttatgatattgcgaaacagggcgtggcggcatttatctccagtattcttgataccggcgttaatgaagagccaatcaataagctgttagtggataaaatgatcgttgagctggataagaaactcagcgctcaaatggatgaaattcttcacgcagaagcattccgtgagctggaagcctcgtggcgcgcgctgaaactgttggtggatcgcactgatttccgtgaaaacatcaaaatcaatattatgcatgcgaccaaagatgagttgctggaagattttgaattttcaccagagattgttcaatccggtttctataagcatgtttactcttcaggttatggtcagttcggtggggaacctaccgctgcggtaatcggtaactatgcgttcagcaattcttcccctgatatgaagctgttgcagtacgtcagtgccgtgggcgctatggctcatgcgccattcctgtcgtctgtggctcccgatttcttcggtgtaagtagttttaccgagctgccgggtattaaagatctgaaatccgtatttgaaggcccggctcacaccaaatggcgtgcgctgcgtgagtccgaagactctcgctatcttggcctgacaacaccgcgtttcctgctgcgtctgccgtattcaaccgttgaaaacccgattaaaaacttcaactaccacgaagatgtcagtaaaaatcacgagcatttcctgtggggcaacaccgcttatttgctggcatcttgcctgacagatagctttgccaaatatcgctggtgtccgaatattatcggcccacaaagcggcggcgcagtgaaagatttgccagtgcatctgtacgaagcaatgggtcagattcaggcaaaaattcctaccgaaattctgattaccgatcgccgggaatttgaactggcagaagaaggttttattacgctaaccatgcgtaaaggcagcgataacgccgcgttcttctctgctaactcagtgcagaaaccaaagaactatccaaatacccgcgaaggaaaaatggcagaaaccaactacaagttggggacccaattgccatacatgttcattatcaaccgcttggcgcactacattaaagtgcttcagcgcgagcagatagggtcatggaaagagcgtcaggatctggagcgtgaactgaatatctggttgaaacagtacatcgccgatcaggaaaacccaccgactgatgttcgtagccgtcgcccgctgcgttccgctcaaatccaggtcttggatgttgaaggggatccaggctggtatcaggttgcgatgtcagtgcgccctcacttcaagtatatgggggcaagttttgagctgtcattggtaggccgtctggataaggaataatccgacatggcagcgctgttaagttgggagcgaggaagctcctccagcttgtttgagcgtatacagggggaaggctccggcctttcccgtcgtgcgcgggcagacgatttgctggtctcaataaaaggacatttgaacaaagtcctcaatgcccgccccggtggttgccagagttcggtagagctaggcgttattgatctcaatgatgctacctcaacggcaacggattttcggcgcagcattgagcacgccatcaaaaactgtattgagagttacgaaccccgtatctcatccgtatccgtgcatgcagaaaccaatgatggcgatccgctgctgttgaatttccgtatcagcgcgcaggtgagctttgacaacatcggcgatctggtggagttcaatattcagttggataacaaccggcactaccgttttgatcaggatttataatgtcgttcgaaaaatatttcagagatgaactggactatctcagacagctgggacgagatgccgccgttgaaagaccgcatctggcgacctttttatctgagcagggttcggaccctgatgtcgaacggttattagagggttttgccttcctgaccgggaacttacgggctaagatcgacgatcagttccctgagttgacccacggtttgctgaatatgctgtggccgaactatttacggcccacgcctagcatgaccattatcgaatacacccctgatgagaatgtggtgaccgaggcggcgttggtcaaacgtggcacgcagattctcagcaatccgattgccgatgaggattttgtcagcacttccccgaaatctggggcgcaatgcgtgtttactttgtgtcgcgacatctggttgttcccgatggcgattcgcgatatcacggtgaacaatagtaacgagcaaggcattattggcattaatttccaggctaaaaacgagctaaatttccaacacttacagttgaataagctgcgtttctatttaggcgaagaagcttataccagtacgcaaatctacctgtggatcagccactattttgagcgcgcggagctggtggttaacgatattactatcccgatgccggattttgactttgttccggtgggttttgatcgtcaggatgcgctgctgccgtacccaaaaaatgcctatatgggctaccgaattttgcaggaatacttctgttttcaggaaggttttctgttctttgatgtttgcggtattccggatttgccggggcatctgaaagccagcgaatttacgcttaatctgcatttttctcaggcgttgccgcctgatgtcaaggtgcggccaacgaccttccgtatgcactgtacgccggcggtgaacctgttccagcatgatagtgaagccattgcgctggatggcactcaggccgaatacccgctgcgtgccagttatcaccatcccgatcgctacgatattttctccatcgataaagtggatagctggctaagtgagaagggcgacggcaaagggcgctcccgcggaagagcgcgaaactacacgccgtttgaaagcttcgatcaccaaatcgagcatgtgggtgaacgccatgctctttattaccacctacgagtgaaaaaatccttattccgcaaagggttcgaacattacatcgcctttgttcgcggagacgaatctcagcttttacacgccgaagaaaatgtttccgtcagcatgacctgtaccaaccgtgagttgccgatgctactgcgggtgggggatatcaatcagccgaccaaagataacccgtcatttgcttcattccgcaatattacccggccttctgtgccgctttatccggtactggacggcagcctgcattggtctttgctgtcaaatatgtctcttaactatatgtctctgctggagaaagatgcgctgaagcagattctgcgcacctacgatttacccagtatgaacaaccgccaagcagcacgggtttcgcagaaaaaactggatgctattcagcgaatcgataccaaaccggtggaccgtctgtttgctggtgtgccggtacgcgggctgcaatccacgctgtatctggcgcaaagcgcctttaactccgaaggcgagctgtatttgttcagcaccattctggctcactttttctcactctatgccagcgtcaatgcctttcacattttgaaagtggtcaataccgataatcaggaatgttatgaatggccggttcagataggtcaacatgcgttgatgtagtgcccggagacgagtctctagacgtctcccgctataacttttttcagctggtagaactgcttaatcagctctcgggtaaaaaactatcctcgcagggggaggcggtagcctacccggcgggcgagagtattcgcttcagatccagcgccagcctggctttcccaacgcgggatgtggtggcgctggaaaagtcggagcgcggtcaatatcagttggaagtgtcctttctcggtttgcacggcagtcagtcgccgatgcccggttattacctggattcactggcctgggaagatgcacagaatgaaaaccgcctgacggatttccttaatgtattcaatcatcgcctgatcactttattacatcaggtgtggcggaaataccgctatcacatctgtttcgaagacggcggtgtggatgatttctctcaacgcatgtttgcgctggtggggctgggtagtgaggttattcgcaacaaacttcaaattaatcacagcaaaatgctggcttacgccggtttgctggccagtccggggcgttcgccggaggttatctgcgggctggtttcccactgtttcgatttacccgatgtagaactgcacagctggcaattgcgtcaggtcaatatcgacccgtctcagcaaaatcgcttgggcggacgggagaagattcgcggcaaaaagtatctggaaaaatcagtgctgggcagcaatttcactatcggttctcgcgtcgcggatcgcagcggcaagttcatgctttgcatcaacaatttatctcgcgagcgcttcctttcctttttacctaacggcgaaaactatcagccattagtgatgtttgtttcgttcgtgatgcgcgatcagttcgcgtgggatttgcgtctcgggctcgccagcaagcaggtcagtggcatggtacttggggcagaccaaaataatttactcggttggaccagttttttaggcgatccggaagagaaacccgacgtaaccatctgcgtcatggaatgacaacccgcattcaggaatagagaaaatggaaaaacaacagccaaccctcacactgcgggtgctaaacagcgacaaattggaaagtggtaaagcggccagctgcctgttcgatattcaggggggccgagtcggcagtggcagcagcaatttgtggtcgattcaggatcaaatgtcctcggttgatggcgctcagtttgccgtggaatggcaggatggcgcgttctgcctgcgcgttttggggcaaccggtcatggttaatcaggccagcttaacccgcgatgctggttttatccgcctacaggcgggggacaaaattaacgttggcatgttagccatgagctgtcacatcggtcatacgctggccgatcggcaagatccgctgacgttatctcctgaatcattggtttccagctatagcaatccgctggaggcgatgatggaaggaggcgaaccgccgcgcggtgcagaagcgccttatcagggtaatctggccgcgactgtttccaacgactttagtcaggatccgctgcgtattttacaaagtgagagcctgacgacgttaacgcagtcgcccgcgaccgaccccgatgccagtcaatccctacagcaggatcgctacagcagccctctgttttcttcaccgctatcagataccgccaaggacagtgccatggatcaggaatttatcgacctgcctcatatcaaccgccttaccgccattgatcaatcagaaacgttggaaatgcgtgagcaacagcacgtcgctatgaccccgctgatgcgtggcattgatgcgcaattgccgattaataatagccaggaagcccatgattttctggaggaaatcggcaaaacaatgaaagcggccatcgacggcttattggcgttacagcaggtgcagcacggattatcggataaacatttgcgtccgattgaggataacccgctacggctgaatctggattacgacaccacgatgaatgtgctgtttgccgatcagaaaagcccggtgcatctggccgcaccggcggcggtggcggagagcctgaataatgtccgtttacaccatcaggctaatcaggcggcaattggagcggcgttggcaaccatgctggacgcgttttcaccgcagcatttgctggcgcgttttgcgcattatcgtcgcagcaatgaacggcaggaaatggacgccgcctgggcgtgggagatgtacaacagctattaccaggaattggcctccagccgtcagcaaggctttgagaaactgttttgggaagtttatgcgcaatcttatgaccgcgccttacgtcagggattgcaggagagcgcgcaatgacacgcatcgcgagtcattcactggccgtgttgttgctggttctgttattgccgggatgcagtagcacttgggaagcgacgaaaaaagttggtcaggtgatgtgggatcccagtattcccgtgggtgtgaaggacgatcagccttcaacggtgcaaatcactctgctggccgaagcggatattaaccccaatgacagtggcgaagctgcgccgctggagattcaggtgatttatctgagcgaagattccaaattattggccgccgatgacgatcagctaaccagcgaagaattagaaaaagtgttgggcaaaaactacatcgaccatcaggactacaccctgttgcccggtcagtacaaacctttgccgccgattaagttgaaagcagagaaccgttatctcggcgttgtcggtcattacaccgacgcggaaaaagccgaatggaaaaaaattattcgtatcgacggcgttgggcacaactaccaggtgttagtgcatgttcgggcgaacgaaattgatctcaggaaagaggaagaatagcgatgccaaccaagaatcgcgtgatttggcgagaagggctatttatcaagccgcagcatttccagcagcaacagcgccataacgactatgtgttgcacagtcttttatcttcattaatggactatggctacggatttcggtcgttagtattgaatcacgaattattaaaactggggcgcgtgggcattacttcagccagcggtacgctgccggacggctcggtatttgatattccgaatcaggatcacaccccaaaacctttggatgtgaacaatctgaatgacgccgccagtcgtgatatttatctggcgttgccgatgcaaaacgacgcaataaacgaagtggccaacgcgcaaagcagcggagtaggcgctgttcgatatcaagagcgcagcgatagcgtgcgagacttgcatactcagggcggcgatgtgagcgacctggcattagcgcagttagcgccacgtttgatgcaaggttccgaagatctcagcgcttttaccgttttgccgctgtgtcgcatcaaggaaaggcgtccagacggagccattgttttagacgcggagtttattccaacctgcacttcgatttcggtttctcctgaactcaaacgctttatggatgaagttgagggaacgctggtagaacgcgccaaactattggctaagcgtatcggttcccccggccagcaagggattgcggacgtggccgaatttatgatgctgcaattgtttaaccgcgtgcagccattgttcacccacagtgcctatctctccacgttacatccgcaagagttctactgccaattggtgcaaacctgcggcgagctgagaacctttaccgatgagtcgcgtctggccggtattttcccggtgtataaccacgataatctgacggacagttttgttccgctgatgttggcgatgcgtcaggcgctcagtaccgttctgacgccgcgcgccatatcaattcaactgatggtgcaggctcacggcattcgggtggcaacgattaacgaccgcgatctgctgcgtagcgccgatttcgtgttggctattcgggcacagattccacaggaacaactgcgtcgccagtttattcagcaaactaaaatcacttccctggaaaaaatccgcgatctggtcagcgtccagcttccgggcgtgccgctggtggcgttatctgctgcgccgcgtcagttgccttaccattctggatacacctatttcatgctggatcagcaaagtcaggcctggaaagacattcagcaaagtaatgccattgcgttccacgtatccggcgacttcccagagctggatatgcagttctgggcgatcaggagcagctaaccatgagcgaaatcgcaccgaatattgcgtcattatttgatgagccggaagccgcgccgacgactcgccagtaccaattggagctgcgcggcgaaagtttgaacccgatggtagatgccgctacgccactgctgggtatggtgatgcgcctgaaaaatatggctaatcaggcgttgccggagcagctttatcagcaggtggtgacggatattcgcgccatcgaacagtttttacagaccaaaggctatgagccgggtgccattgtctctttccgctacatgctgtgtaccttcatcgatgaaaccgctttgggacacggctggaatagtcaaaacggttggttacagcaatcgctgttggtgcagtttcacaacgaaacctgggggggagaaaaaatctatgtgttgctggaacgcctgatgggcgaaccgcagcgttacaaggatttgttggaattcatctatctgtgtttctgtcttggctaccgagggcgctataaggtcagtgcgccgcagggggatgaatttgaacgtttattcagacggttacatcaccaattgcatgaaatgcgcggcgatgcgccgccgacggtattacacctcaacgccggagagtcttccggccgttatcggttaagcaagcgcttaactatcaaacatttactgtggggcggattagggctgttagcgctggtctacgggttttatctgattcgtttacacgatcaaacccaagatatcttgcagcagctaaacaacttattgagctaaggaaggccaaatgatccgcatagatttacccacattagttaatcgcctcaatcccatcgcgaaacatgcgctggaaacggccgccgcccactgtgtcagcgagcaggaaatcgaaattacggtttctcaggtgttgctgcaattgctgaatacgccgttgagtgatgtgcgtttaattatcaataaagctgaaatcgaccaagatagcttgagggaacagttggacacccgcgttcccagtcatcaggtagtgactcagtcttacccaagcttttcaccgctattgatcgagtggttgcaggatagctggctgctgtcctccacggaaatggatcacggcgaaatgcgcagcggggtcatgctgatgactttgctgatgagcccggcgcgctatctttccgcacgtgccgctcaattattggctccggtaaaccgcgagttattaaggcaaaactttagtcagtggacgacggattccgcagaaactcaggttgtttctcttgcggcaggccaaacctctgccgttcaacctaacggtgaaagtttgttagcccgttacgccagcaacatgaccgaacaggcgcgcagcggcaagcttgatccggtgctgtgtcgcgatgaagaaatcgatctgatgatcgatattctgtgccgtcgccgcaaaaacaacccgattgtggtaggggaagccggcgtagggaaaagcgcgttgatcgaaggactggcgctgcgaattgtggccgagcaagtgccgcaaaaattgttgagtgcggaattgatgacgctggatctgggcgcgctgcaagcgggcgcggcggtgaaaggggagtttgagaaacgcttcaaaggcattatggcggaagttaggcagtctgaaacgcccattattctgtttattgatgaagcccataccttgattggcgcaggtaatcagcaaggtggtctggatatttccaacctgctgaaaccggcgctagcgcgcggtgaattgaaaaccatcgccgctacgacctggagcgaatacaaaaagtattttgagaaagatgccgcgctgtctcgccgttttcagctggttaaagtttccgaaccgagcgccgccgaggccaccgtgattctgcgcggtttacgcaccatttatgaaaaagcccacggcgtactgattgacgacgaagcgctacaggcggcttctacgctcagcgatcgttatttatctggccgccagttaccggataaggccattgatgtgctggatacagcctgtgcccgcgtagcgatcaatttgaccagtgcgccgcgagaggtttcggctttacagactgaattgcaccagctagctatggaaatccagatgctggagcgcgagctgcatattgggctgagtgacgatagtgaacgcctggcaacgttactgactcagcgggaagagattgacgcccgtcgattggcgctgatggcaagctggcagcagcagcaacagttggttgagcaaattgttgcactgcgcagcattctactggaacaagacgatattaccgccgatgaacgagcggaattagtgcgtttgggtcatgaactggattcattgcaacaggtgcagtcgctggtttctcctcatgtcagcaaatcccaggttgcggcggtgattgccgaatggaccggcgtgccgctgaatcgtttgtcccaaagtgagctggcggttgtgactgagctgccactttatctggaaaagcagatcaaagggcaggataccgccattgcttatttgcatcgtcatttgttgaccgctcgcgccgatttacgccgccccggccgtcctctgggcgctttcctgttggttgggccaagtggggtaggtaaaaccgaaaccgtactgcaaatttcagacttattgttcggtggccagcgttatctgaccaccatcaatatgtctgagtttcaggaaaaacacaccgtatcccgcctgattggttctcctccaggctacgtgggctatggcgaaggcggcgtattgaccgaagccattcgtcagaaaccttattcggttgtgttgctggatgaagtggaaaaagcgcatccagacgttctcaatctgttctatcaggctttcgataaaggtgagctggccgacggcgaagggcggattattgattgcaaaaacgtggtgttcttcctgacttccaatctcggctatcaaaccatcgtcgataacgtcgctgatgcggattccatcaacgatctgctgtatcccgaactggctgctttctttaaaccggcgctgctggcgcgtatggaagtgattccgtatttgccgctgggacgtgaaaccctgctggcgattattgccagtaaattgcagcggttggataacttgttgcgtcaacgatttaacgccgaagtcgtgattgacgatgcggttacggaagaaatcttgctgcggaccactcgcgccgaaaacggtgcgcgcatgttggagtccattattgatggcgtcctgctaccgccggtctctttgttattactgcaaaaaatggcggcgggaagtgacattggctttattcgtatcgcagtagacggacacagctttgttgcagaggtagaggacaaggtatgaaacagcggctaaaaagcgtattggcgctattggataacgacaccattgagcaactgatacaccactttttgcaggttaatcatcgtcggcaacgttttgatgctttgctggttaccatgctgaacgtcaatgaaagtcgtctcgattgttacagcctacctcggcaggacgagcgcgcgacgctgaaactcgacgttcaaattgatgaaatcaaccatccgctggtacaggttttacgtaacggcgtccccgcagtgtgggattccttacagcgcggtgtgcgtatcgaaaacgccgattttcgcggttttgtgcaagaactgcccagcgcctgtggtttgtacgcgctgccgttgttcaactgcaacggtcaggcctgcggcgtggtggcggtatttgccgaaaacattgagcactacaccctcgccaacggcatgtttagcatttactgccatattttccagcatcgtttgaataaattgcaggaactggaacagcagcgagcgcaactgcgacagattcgcgaagtattcaaagcgcagcagcaacgacaaaagcagctggatgagttgctggtctccctcagcacatcggataacaacctgtctccggcaggtttatctaacgattacagcaaaatagacgatctgaccgaagcggtggaagagtttgaatgcaccattttgcgtcagcgtcagcgcatgtacggcacggataaaaaacgcatcgccgccagcctgaatatggcaccacgcacgctcgcctataagttggctaagtatcggtttcagttatgaaaaagttgatattaacagccacattgatattggcttgcagccacagtctgatggctgcagaagatgtacctaccgttacccaacaatcacctcagttatcggcgctgactcagtgtcgcaatgagccgtctcccttggttcgactagcttgttacgatcaggccagcagtccggttggcgtaaccgatgaccgaatgatggggccgggttggcgtcgtgccatggtgcaggaaaaagggcgggaggcacattccctggcttttctgacccgccagtccgctggcaacaatccgaccgtgattatcaccacgccggcgataggaatgccgcctccgcgtccggttctgatgtttagctgtatcgataacatcacccgcatgcaggtggcactggttgcgccgcaaaaggaaggcgaaggcgcgctcacctttgttaccgaccgcactaaattcgataccgaatggtttgttcgcgaagagggtttcctgctggaagccagtcgcgggctggccggtattgatgaaatcaaacgactgctggatggagaaaccttggccatcagctcaaaacaaggggcggcagtgcggctgaccttcaacatttcctcgctggcagaggcgatcaagccactgcgcagcgcttgtcattggtgaagttgatatgaatgctatcgcccaacatccctggcggaatttgctgctagccccgttagccgacgggcgcgcagcgctggcgctcaaagacgataacccgcgctgggagtttatcgacggcgaaatggtgaagctgggttcgcttacccacgccagtctgaatattgctgaattgcagcagcaggcgatgacgctgctgtccgaagaaagcaaagacatgcgcttactgacccacctgttgcgtactttgcagcacggtggcgaaccgcagaatatcttgctggcgatgcaattgctttgtgattacgtcagccatttttgggccgaagcctggccgcacaatggtttgcataaacgccgtttggcacagcagatcgttaaacgtttcgacgccgcagccagtctttttagccaacgagccaccggtgaacaacggctggaagctttagggcaactggcgcgactggcacagtgttggcacgaaagtgagcctcaattggcgaaagaagtggatgagctgagtttcccctatcgctatcagccagaacctcaggttgcggatacaccgcagaccagcagcccgtctttatccagcggcagcgcgccggtttcttctgtcgatgcgccggttacggaagcgccgattgccagcgtcacggtggacagttccagcgatcgtgcgtggcggcaaacgctgctgaaagtggcggatttgctgtgtgaacgccatccggacagcgacagcggctaccgactccgacgccacgcggtctttagcactatcaccacgccgcctcagtctcagagcgatggccgcacgccgctggccgccgtttcagcggatcgcaccgccagctatcaggctgcgttaccggcagccgatttagcgctgtggcagcaaatcgagcaaagcctgacgctggctccttattggctggacgggcattttctgtcggcgcaggtggctgaacgtttgggttatccgctggtggcgcaggcgattcaaagcgagcttcgcgctttcctggctcgcctgcctgccctgcgggaactgagctttaccgataaaaccccgtttctctctgtggaaaccgccgcttggttgcaaccgcaggaaacgacggtaactaccggtagcgcccgtgaggatcagaatgatatctggcagtgctatgagcaacagggattggaagcggctctggctgcggttgatcaacagcaacagcaacaaactgaacctcgggatcgtttctatagccagttgcttagtgcgcaattattggaaaaggccgggctggcggcaatggcgcaacagcagtatcagagcctttatttggcagggaaacagttgtcattaccggagtgggagccttcgctctttgccgggttatcagaaaaacagcggcggcagaactcatgacagccacgatgcgacacaggaatgttaatcaatgaaaatgccttcaatacccaaaatgccaaagatgccttcatttttacgtttattgaagcccattattccgcgttttaagtcttcaataccgatattgctggggctgctctggtgcatcgctttggtagtgatttggctgtgggggccactgtggcaaatgggggaacagcatccgctagaatcacagctgagtcgttggctggtgacggctgtgctggtattggttgcggtgtgctggctgacgtggcgagttacgcgacggctgcaagaattagaaaaactccaactggatcaacagcagcgggaagaagatccggtgcaaatcgatttggatcggcagaacggttatctgtctcgctggttgcagcagctacagcgctatctcaacacgccacgctatttgtatcagctgccgtggtatctgatgttgggtaccgaacagagcggtaaaactacgctgctgcgggaaggttataaactgacggaaatctacagccccgacgccagtaaaggcgatgacgccgcacagctacaggtgcgctgctgggccggtgaaaaagcggtggttgtcgatccgaccggaaagcttatcgagcaaccggatcaaggagaggaaggcaaacctcagctttattctcgcttgtggcaggaactgctgggctggctgcaacataaccgtaagcgtcaaccgctcaacggcatcatcgttacagtcgatgtttatcagttgctgaccgccaataaagatcggcgggaaagttatatcgaccatatgcgccagcgtctgcacgatgtgcaaatgacgctgcacagccagattccagtctatttggtgctgaccaagctggatttgctgtacggctttgaggcgatgtatcagtcgttggataaaacccagcgcgaagcgattttaggcgtgactttcactctgaatacgcaggatgaagatcactggcgcagcgagttgaatcaattctggcaacagtggatggcacaactaaacaacgccatgccggagatgatgtttaacggtgtggatagcgatcagcgcccgcagctattcagttttacccgtcagattcacggtttgcatgattacgtgctgcaaatgctcgatcgtatgctgtttagcggcgatagcaaaccggcgctgctccgcggggtttatctgacctcggctcagcagcgtggacaaatggacgacctgtttacccaatcggcggcggtgcagtatcaccttgggccgcaggcattcccgacctggccggtgggtgacacttcttcttatttcgccaaaggattatttaataatgtcctgctggccgagccaaatctggccggtgaaagtcgccaatggctgcgcaattctcgtcgccgcatgatggtattcagcgcctgcggagcggtggcgattgtcgggttgctattcggttggcatcagtattatcaaagtaactatcgggccggacaagtggtgttgactcaggctaaaaccttcttggaaattccgcctccgcaaggtgaagaccaatatggcaacctacagttaccgctgcttgacccgattcggcaggcaacactggcctacggtaactaccatgagcgcaatagcctgttagcggatctggggttgtatcaaggcagcaaaattgggccttacgtcgaaaatacctatctgcaattgttggagcagcgcttcttgccatcgctgatgagcgggttattggttcagctaaaagctgcgccggcgggcagtgagcagaaactggaaatcctgcgcgtgatgcgcatgttggaagacggcagcggtcgtaataaagggctggtggagcagtatatgcgtaaccgctggagcgagaagtttaacggccagcgtaatctgcaaaatcagctgatggatcatctggattacgcgttggagcataccgactggaaacgcagccgggataacggcgatgtgcagtcgattcagaatttcgcgccatatgttccggcggtaaaagccgcgcagcaggaactcagtaaactgtctctgtatcagcgggtgtaccaaaacctacgtatcaaagggcaggatgttttaccgcctgcgttgaatctacgcgatcaaatcggtgccagcttcgatggcatttttgtagccaataacgaagatctgctgatggtaccgcagttcctgacgcgtcagggcttgcaaagctacttcgtaaagcaaaatgaccagttgatcgatctgaccagtatggatagctgggttttgagtttgtcgaaaaacgtggaatacagcgataccgatcgcaaagaaattcagcggcagattaccgagcagtatctgggcgattacaccgccgcatggcgtgcggcgatcaacaacctggagatccgtcagtttgaggatctgccacaggcgatcgctgccattgagcaagtgatcagcggtgaacagccgatccgtcgagcgctacaaaccctgagcaacaacacgcaattacctgccgccagcggcgaagctgatgccaaagatctgctggaacagccggattaccgcctgatgtcgcggattaaccgcgagtttgcgccggaaactgctgcgctgattgaacacggtgataaaggcagtacgttgcaaagcgtctatcaaaaactgacggatttgcatcgctacatgctggcgattcagaactcgccggtaccggggaaagcggcgttgaaagcggttcagcttcggttggatcaaaataacagcgacccgatttttgaagtacagcaattggccaaaaacctcccagagccgctgaatcgttgggtgggcgatctggcggagcaagcctggcatgttgttatgatggaagcgattcaatcgctggaagtggaatggaacgacacggtagtgaaacagtatcgcacctatctggcgggccgctatccgtttaatcctgaatcgacacaggatgtgccgctgagcgagtttgaacgtttcttcgcgccaaaaggtgtgctggacaacttctatcagcaaaacctcaaacctttcgtcgaaaacaatctgaccaacggcagcgacggcgagttgctgatccgtgatgacgtcctgcaacagttacaggtagcgcagaaaattcgtgagactttctttagcagccagaacgggttaggcacgcagttcgctattgaaccggtggcgctggcggtcaataaacggcgcagcgtgctgaatctagacgggcaattgctggattacgcccacggccgcagcagtaaggtgcatttggtgtggcctaactccatgcgctcgggtgtggaaagcaaaatcactctggtgccggacgcttctggtaaatcgccgcgcagcatcgcctttagcggcccatgggcacagttacggctgattaacgccggtgaactgaccaatgtacgggaagattccttcgatgtgcgctttaacgttgacggcggccatatgacctatcgcattaccgttgatgagtcggataacccctttgctggcggactgtttagtaaattcaaattaccggacacgctctattaatgagtatgcccgacgcgcgtcgtcgggctttttttaaggaagagttttagtgagcgacaataaacagggattggttatccgcaccggtggcgatccgcgccaatggccggaattcaccgcgatccgtgaagaaattaacaaagccaatcatccctcgcagccacaggttaattggcggctaattgagtctttagccttaacgctgtttcgcagtaacggcgtcgatctgcaaaccggcgtgtattacaccctggcgcgtactcaactgaatgggctgacaggtttcaccgaaggctgcgagctgttggccagcctgattgtcagcgaatgggatcgtttgtggccggaaaaaccgctggcacgtattgaaatgctggaatggttcaccgcgcgactgtgtcacttgttgcgtcagcaggtgttcagcagtgaagatttacgactgatttatcgcgccgaacgtgccttgcagctcatgatcgataagctgcagcaggtgcaactgagccgagtgccgcgcatcgaaaatatgttgtatctgatgcaaaacaccgcgaaaaaactggagcgagccactgaagccgccgcgccgtccatccaggcctatcaaatgccgccgttggtgtatctgaccgcttcggatgatgccccgtcatcgcgggaagtgccacccgcgccaccccagccacagcatgacgatttggaacatgcacgagtgcaggtgcgctttgtgccgaccaagcgtatgtcggcgctgcgaggtttcaatttgggcatcggtttttcgctattgatcgccgcaggggtctatctgatgcaagtgcggccaatggcgcaacagctggctgctgtggccgctgagcctgaaggttcagccttactgtggctacaccagccggagctggagacctatggcgagcaaatggatcggctggctaaacgttctccgctggaagtgttaggtgggccagatgcgctaatgaaaaccgcccagcagctatggcctgcagatgcccggcaaaccggggtcagccaacgctggcaggagcaactgcaagccagaatgggcagcaatcaggattccgctcattactatcaggccaaaatgggcgttcagcagctttctgaaaaactgttagagcaggaaaaacagaaaggcagcctgaccatttcttatttaaaaactgcgctctatcgcattcaaaacaaccttaacagcgaaatcccgctggaagagctattgcgccagttctctgcgcaacgggagcagaagaaaggcgtctcgccggtattgatcaaacaaattgatgaccgcttcgatgccttactaagccgctaccaccaactgacggttcaaactgagccagcccattaacgccgacgagaagggataaccatgtttagtcgtgatgagaaaaaagataaaaccggcgcaagcgatgcattaggagccgcagccgttgatggcgtttccggtctggcggacggcgctggcatggtggccagcgtcgccggtggcagcgtggggcgtgcggcagagaaagtatccaaagtggcaggaaccgctagcaaagccgtagataccgcgaaaaatgcctccggtatggcttcgaaagcgatggataccgcgaaaaatatggcgggcatggcctcaaaaggcgtagatgcggcgaaaaatatcggtggaagcgccagcggagctttggatactgcccaaaatatcgttgctggcccagcatctaaagcgatgaaaaccgtacagggtgcagcatcacaagcgaccggcgcgatgaatagcgccaaaaataccgtcgggcgtgcggcggcgatggctggctcggcagctggcctcagcggcgcagcgggtttactgggcgggataaaacagccttcggggctgcaatttacgctaaccgccggtggtttgccggagcagactttcgtggtggtggatttcagcctgagcgaaggattgtcatcaccttttattttacacgttggtctggccagcgccgatcctgccattgcgtttgacgcggtgctagacgaagtggccaccctgtttatctggcgtgaaggcgagctgcaacgcagcattaccggtatggtctccagctttgaacagggcgataccggttttcgtcagacgcgctacagcatggtgattcgccccgatttttggcgtacttctctacgtcataactcccgtattttccagcagcaatccattcagaccatcgtttcttcgcttctgaaagagaacggtatcaatgacttcgccttcgctttgcgtaatccgcacccagaacgcgaattctgcgtgcagtatcaagagtctgatttccattttattcagagacttaccgccgaagaagggatgttttactactttgaattcgccaacggtaagaacacgctgatttttgccgatgatgtcggctctctaccgccgggagccgttttgccttacaacccgaccaaagcggcgcaggccaaagaactcagcatcaacacttttaaacgcagcgcgcaggtgcggactgccagcgtgcagttaaaggattacacctttaaaaatccaaactgggcggcggaattcaacgaacaggcacgagagctggaaaatcagcgtccagactacgagcacttcgattttcccggtcgttttaaagacgaacagcacgggcaggatttcactcgctatcggttggaggccctgcgtaatgatgccaaccttgggcagggagaaagtaatgatttccggctgcaaccgggtcagctctttaccctgactagccaccctcgggccgatctcaatcgtaaatggcagttggtcagcattcagcatcacggcaagcagatgcaggcactggaacaggaatctggcgatcaggggacggtgctgtttaacagctttagctttattccggccagtcaaagctggcggccaacgccgttgccaaaaccggtagttgatggcccgcaaatcgccatggtagtagggccgccgggagaggagatttactgcgatcaatacgggcgaattcgtctgcaattcttgtgggatcgctatggcaaatccaacgataacagttcctgctggattcgggtaacgcagccgtgggccggacaaggttgggggatgttagccattccgcgtattggtcaggaagtggtggtggatttccttcatggcgatccggatcagcctatcgtgacggggcgcacttatcacgccaataacatcccgccgggaaccctgccgggcagtaaaacccaaatggcgttccgatccaaaacccacaaaggggacggttttaacgaactgcgtttcgaagatgagaaaaacagtgaagggctgtttatgcatgcgcagaaagatatgacgaccaatgtgcttaacgatcgggtgaccaccgtggttcacgatcacaccgaaagcgtcggtcacgatcaggtgatttctgtgcgtaacgatcgtcataaagaagttgcgggtaacgaagtgacttctatcaccaagcagcgccgcatcatggttcagggtagtagcagtctggaagtcaccggcagcatcatgattcagtcttcggccgaggggattcagatcggcaccgccggtgccagtattactttggataatgcaggcaatatcaccattgagggcgccagtattacgctgaaaggcaacccgataaacctcaattaacgaacattcttcaccaaataattataagccacggagcgactatatgactcaccctgcttacctaatcaatgaaggcactttagccattccagccaactggcgcgatgaaaccatgaatgtgtttattgcccccgacgacagcggaatcaatttagtggtaagccgtatggcggttccggtcgggctggataacgaaagttactacgcgcaggttatcgagcaatttcaaaccagtctgcccggttataaagagcgcagccttacgaccgtcacgttgagcgaacaaccggctcgtttgctggaatatttttggaaaagccccgaaggggaaatgcaccaaagcgtggtgatgcaggtgcgtggcaccaagttactgaccttcaccatcacctcaccaaaagtactggcggagagccaaaaaacagcgttgctggcgattatttatagctaccaggctgcgtaaaagtgtgtaacgcgggaggcgtttcatgtcgttaacagatgatattgtgcagcgaattgcccgagttggggccattcatgccagccccaaaccggtcagttccggcgcgcccggaccggctgcggcgcgattgggcgatcctatcaagcatgccagttttctcggtgcattagccggagccgtggttggggcactcattagcgtagctatttttgcggtggctgctgcggtggtggtgggcaccggtgggttggcgaccgtggcagtactggcgttaggcacagctgggacttttgctatgggagggataatcagtaaggccagttcggcggtcagcgcgatggtagacagcgttggcccgacggacggcgttctactcagcggctctggcgatgtatttatcgaaggtaaagcggctgcccgtgcaaccggcgataccgctatgtgtagcaaacacagcgcgccggcgactatcgcccaaggcagcgaaagcgttgccatcaacggtatgccctcggcgcgggtgggggacaaattgacctgcggtccaaccattaaatccggcgcatctacggtatttatcggttccggtcagggtggctatctagaagtggccgaagaattttctatgctggaaaaagccattctggtcgccgtagaattcttggttccaccgagtaaaggtctattaaccggcacagcaaaactgtttaccaaagcggggagtaaagccgcagccaaaggcgcaatcatgggtgctaaacaggctgcgaaaatatgcgcgggtaaaaccttatcttgcgtaactgccgcatttaaaagtcataaaggcatagcacgctttactgaagcgggtaagaaattcgtcaagggtgaccctattgacgtggtcactggtcaattggtcgagcagcgtaccgatctgatgttaggccaaaccttgtcgctggcgtttacccgaacctgggctgagggctgttttggggtattaggggctaattgggcggatagcttcagcgaatacgcggttatcgatcctgaaaatgacagtattgagattttcactcaggaaggcagttctctgaacttttcgctaccggatggctatgcgttcagttttaatccggatcaccctgatttcactgtgacgcgcggcaacaagggtgtcatcctgacggatcgccgcagcggtattcagcgtcatttcgccttagtcgggcaaaaggatcggaataaatttctgcttagcgctcatcaggacattaacggcaatcatatcgatttttgttatgacgaaaggcaacagctcacacgcatttgtcacagcgacggttcggaactgacgctgatctggaatgcgtcgcagcaactgaccgaaattcgccgcaccgacgaaggtttatatgatgttctggcgagttatcgctatcacgacagcggttttatggcggaagcggatagcaccgagttctaccatcttttctatgaatataacgcgcagggttggatcagtcgctggcatgataatgatcaaacctggacggcatatcattatgatgcgcaaggacgttgtaccgacagcataggcgcagacggttattacccggtgcactttgactatttgccggggctgacgcgagtcagtaacccgcaaggagcaaccaccgagttttattttactccgatgaatcaggtgaccgaggttcgttctcccaccggaaatatcacccgatacgagtacgacagttacggcaatctgttgtcgcagatcactccttcaggccatcaaattaccctgagctaccttaaagataccggtctggtgacttcatttactaacgctatgggcgcctgctggcaatacagttatgacgatagccaaagactgttcggcattaccgatccgttagagcgtacctggctgcaacagtatgatgaaaaagggaacccccaaagttttaccgcaccagacggcagcagtatcacgttggaacgtaatgaatttgggttggtgactacgcaaattcacagcgacggtagccagcgcagaatggaatacgatcatcaccagcgtctgttccgcattttcgatgaagaacagcgggtgatgaatctgcgttacgacagccgggataatctgcaaactctcagcacccctggcggagccttatggcgctggcgctatgacaggcatcaacggctggcggtaagcgatcgcccgaacaacagtcaggagcactttacccacgatcgtcacggtaatctgacccaatatcatgatgccaacggggttagttggacggtggaatacggcgcttttgacctaccgatttcccgccgcgacggtgaaggccatatctggcgctatcgctacgatgctgacacgctacaactgatagcagtgactaatccccaaggcgaatcctaccgctatacgttggatagcgaagggcgggtcatagaggaacgggattacgccgatgcggtgtggtattaccgctacgatgccgagggaaattgtagccagaagcaggatgcgctagggaatatcacgcattatagctacgacccttgcgggcgcttactgacccagagcaacccggaaggagcgacgcagtatcaatacgatatgatggggcgtttgctgagcgttaccgcaccggatagtactttgcactttgagtatgacgaacaggatagaccgattcgcgagattcaggtagccggtgaaattctgcgtcgttatccggataaccagacgttggaacgagaaattaccagtgttgggcacgagtcgggcagttggctgactcgtattggcgtaaaccgcaccggtgagcttattcagctggaattgccagccggacaaagtttacagctacagcgggatgccgcggggcaggaagcgggacgcgaagcggcggcgggttttatgctgcgtcagcaatacgacctgatggggcaggttatccatcaacgcgcaggccgcaatacgcgggtattccgacaggaagaactgagtgacattcctcagcctacgttggccgaactggatcgcgaatatcagtatgacgctggtttgcagttggttgcgatcaacgatgatgttgaacgactgaattatgttgtcaatggcaacggacaggtgatttcggtcagcgaacgtaatcaactgcgcgagcattaccgttatgacgccagcggctatccactacccagacgggtgggcgatcaacagtgcggcgcagaggatgaaatttatcaccgcggccatcgtttaaatcgtcttggtaatcagctttatgaatatgacgccgctggccgaatgacggcgcgccgtacgcaacaggaaggcttccgaccggaatacacgcgatttatctggaatagccagaaccagctggtggaattgcgcaaacaaaatggtgatagctggcgctaccgttacgatgcctttgggcgccgtatcagcaaaacctgtgaacagcaaggcatccgtgtgagctatttatgggacggtgatgttattgctgaaattcgcgattatcgacagggcgagttgcaaaaaatccgacattgggtgtttaatggctgggagctgatagcgcaacaggaatgccgagtcagtgagggcgaggtaggcgaagtcgaaactcactacgcggtcagcgccccaacgggggaacccctcgcgctctttaaccccgcaggaaaacgcgtctggcaacgcgccaaccattcgttatatggcgcagcgctggcgaaagtgctcaaccacagccagccagaacccggtttaaaattcgccggccagcttctggatgaagaatcggggctgcactacaaccgcttccgctactacgacccgcaggcctgctgttacttaagtccggacccgatagggctggcgggggggttaaacttatatgcgtatgtaccaaatccacttacatggatagatccgctgggactagcgacgtgtcctcctgtaggaaatgctggtaatgatggctataagttctcgtttggctcacttcgtcatatattaagaaggcactctcctcatgtcggtcctcctaagcaagaaccatatgcatcaatgaagcctaaaaggcaaaaaggttcaccattcccatcggagtggagcaatagagatattgcgcatgctactgtggaggtcgctaataatcctgcaaatcaagtcatttctaatagggaagggttctttggtaaggtatttgaaggcacatcgacccaaaatggggtaacacaaaaaatacgtgttattacagaccatgttgatccgcatattggtggtactggtccaggtgttattacatctagtattccaattaaataagagagggttgatgaaatataccacatgtcaaaattgttattctagctatgaatcggatctggaaagatgtccagactgtaatgcatctcaaggtgaaaaagatgatgggttaatagtttttacagaagaagctcgttctgaaatatcacgccttggcggcattgtgtatgatgttattcatctccctgaagagcgctatttaattccatgtgagtggggggtgcttctttataataatgccaaaaagtctttttggcattacctttgtggaattgttgatgcagttgtggttaatgaatatgtggagatcacacatggagataagagagactatctgacacttgatgatggaagattagttaagagggagaatgttggctaactctcttctggcgtggaatgatcctctcaggatcattcctgctaattatgaaatgtcagtgcacatacaactctgctgaatcctaatcaccacctgaccgggcatcacgctgatcaccagcggttgcccggtcaggccgcactgtgtcagccagtcctctggcagagacagattgccgttatcccgtatctagttcacgtaaccacagccagccagaacccggtttaaaattcgccggccagcttctggatgaagaatcggggctgcactacaaccgcttccgctactacgacccgcaggcctgctgttacttaagtccggacccgatagggctggcggggggattaaacttatacgcgtatgtaccaaatccattaacgtggatcgatccactggggttggcggggtgccatactcaaaaatatgaagtaggaacttttgatgatttacagcggcgttcaaaagttggtgatggattagatattcaccatgttactcagaaacaccctgcaggccaggttatatctggttatgacccaaagactgcaccatcaatggctgttccgagagctgaacataaattaataccaacaactaaaggtacttttacaggaacgccaagggatttattagcgaaagatatacgagatcttcgtaactataccaatgcaccaccttcagccattaaagatcttatcaggctcaataaagaaatgttccctgaggcgtttactaaattaaggtaagttaaatggatgctaataagtttgtagatatattaaaccttgttgttaaagatgccgcggtagaagatataatatctatactggaatccccaccaggtaaaaagccatcaaaggaactggttgatttatccggcttttataattcacaggccgatgaggctaaagaatttataaaacagataatcaagcttgttgccgatgatgctttattcggtatgctatgtgttatcgatggcgttcgtgctatagaggatgatgaaaataaaggggagttggttttgacttatcagaaagataatgaattgtctgtcgtgttaaacgaagataaagatttgcacgatatatacaacgccaattagactaaagccgggaagatcctctttagttcttctcggcttttttatctgttgttacgctaatatattaccctgctgagtcctaatcaccaccttgccaggcatcacgctgatcgccagcggttcccggtcaggccacactacgtcagccagtcctctggcagagacagattgccgttatcccgtatctagttcacgtaaccacagccagccagaacccggtttaaaattcgccggccagcttctggatgaagaatcgggcctgcactacaaccgcttccgctactacgacccgcaggcctgctgttacttaagtccggacccgatagggctggcgggggggatgaacttatatagttacgttccgaacccactgacatatattgatccgctagggctggcatcctgtcgtctaaataatatgggaagaaccccaggcaaaaatagcaagactggcagagaagttattgaacgaatgcgtggtgaaggtcgtattcgtggtgctggtagtgatatgaggtttaaaagttcaacggataataaatggtatcgcgttcaggatgctgatatggctcacttaacagatgctgttaaatattggaatcagaaaggcggttattatggcccgaaatctaaagaagttagagcctttatgagagattccaaaaattatgaattagaatattttgggcataaccgttctcaaggtgctaaattgcctgatagatatagagatccaagtgattttattgggccagcagaaatgtcacaatatttttaataggtgggtgtatgaaagagcttgcagaagataacctggaattagaagaaaaaatagtatctatcatagaggctgggaatgtttacagtacgaatggtgactttgactctgcattgaaaaattatcaagaggcatgggagttactgccggaaccaaaattggaatgggaaatgttaagttcatggttatcaggttctttttatactgcatattttaatcggtcagattttgaaagtgcaaaatattggggtgaggcgcaacttaaagcaacaagctctaatatagatacagcaccatcaatcgacctgggaatggtctgttatgagttagagcaatatgatgaatcatataaatactttgacgatgcctataattatggtaaggctcgtgcatttaaagaaagaccgaagaagtatcttgacttttatttatccaagaaaaaagagatgaagtaaaaataaatggccggaatggatctctttagatctttccggccattttatatgtcgctacgctagtatattactctgttgaacccgaattaccaccttgccgggcatcacgctgatcgccagcggttgcccggtcaggccgcactgcgtcagccagtcctctggcagagacagattgccgttatcccgtatctagttcacgtaaccacagccagccagaacccggtttaaaattcgccggccagcttctggatgaagaatcgggcctgcactacaaccgcttccgctactacgacccgcaggcctgctgttacttaagcccggacccgatagggctggcggggggcgagaatacttacgggtatgtacataacccgctgggatggatagatcccttagggttggcagcttgtccactggcaaacgctggtaaacttaaaccaccgttagcgaaaccaggcgaggacttatttgttggcacatatagccaagtccgtggagcaaatataaagagtggtcttaatccaacccatacaccgcatcatgctattcagaatgctgttagtccgacgacacatgctcgaggaataacgataaacatgcgtaaagatctgcacgaattaacatggacatataaaaaaccgtttgtccgaggtttaacaaataggcaatacctagcaagagacattgttgacctgagaactatattccgtaatgctggatatagtaaggacgttgttaataggcagttgtctgagctaatcaaacaaaacaaagcattatggaaagctatggagctatgaatatgaacagaaatgaagcgctgtctttcttacgtcataatcaaccgatgccggatgatgacgttttaacacaagaactaattaataaatatgatgaggcaagaaagtttttcattgctcatcctgacaaagaggcaatctcattattccttaactcttatggtaatggagatgggtggggagtatatcaattagtagaagattttttttataaatgccatcgcgatgatgtagtgttggaaatacaaaaaacattagaaaacccatctgtaaccgacaatgtaagatactgggttacccaagtatcagcagcattcgctgatgccaaactaaaaaaaggcttggaaatatcgctaaaatcgaagaatgaagatatccgagaggcagcacagttatctcttgatatgattgatgactaatattagaacggggagataatatttggatctttccggtttttttatctgttgttacgctaatacattatcctgttgcacctgaatcaccaccttgccgggcatcacgttgatcgccagcggttgctcggtcaggccgcattgcgtcagccagtcctctggcagagacagattgccgttatcccgtatctagttcacgcagccacagccagccagaacccggtttaaaattcgccggccagcttctggatgaagaatcggggctgcactacaaccgcttccgctactacgacccgcaggcctgctgttacttaagcccggacccgatagggctggcggggggattaaacacctatggttacgttcacaatccgctaggatggatagatccattagggctagctggatgttctactcttgatcgcattattgccgatgctaataaggttgcgtcacctggagggcatataactccaaagcaagcagaaatattaaaaggtaatttaccagtagttcaaagacgtagtgctttccaaaataggttgtcacgtaaagaatttgtgagagatcaaaaatatcttatgagtcaatgggaagcgaatacaggaagagtttggcctactggggcaactccgcatcatataattccattggaaagtgggggggcgaataaatggtggaacttaatgcctacacatggaacattaccaaaccactctttacctggaatacctggcccgcacgcagcaggtggtgtgcttcgtactacagtccaacaaggtaggaaagctttaccgccaggaaccataaccgatttgagattttaatatgattgatattaataaagtgttggaagaaatagataaggcaagattcttttcaaatatgggggtgtctgacatccagaatgaaaatgttattttaattaaagatgttgaaaaggtgttcattaatccatctgatgtggagtttaatggcctttatgctagtgctgagtggcttccgacctcgccaactcaagatgacccattttataaaggtcaaactacatctaaagagcttgcagagcttagaattaaagtaaataaagcagtattaaatgcaactaaagggttacctaaagataaatttatatgcttgccacatgattttagccaggcggcaagaaatggaatatgctttgcttttaggcagtatgtatctgaaaagtatcaaaacctaggaactagatgggaggatgttgtgcggatatattatgctgggcattggcctgttggctttgctcaagaaaaaataatagctatttaatataagactagatagatccaagaaggatctatctagttatttgtaactgtggttacgccagtatattatcctgatgtacttgaatgaccacctgaccaggcatcacgctgatcgccagcggttgcccggtcaggccgcactgcgtcagccagtcctctggcagagacagcttgccgttatcccgtatctagttcacgtaaccacagccagccagaacccggtttaaaattcgccggccagcttctggatgaagaatcggggctgcactacaaccgcttccgctactacgacccgcaggcctgctgttacttaagcccggactcgatagggctggcgggggggatgaacctgtatgcctacgttaaaaaccctcttacatggatagatccgctgggattggctgggtgtaatctcaatcctaaagatattcactacatgcaaagctcaattaaaaatcaaacaggagctcatactgttctggataacgctgctgcattagcaaatggaacacttaaagctgcggatctacctgctattaaggtttggcgggatgctacagggaaaatatggactctagaccatcgaagattggccgcatttaaaatagcaggtcttgaaagcgtaccagtccaataggctacagccaaagaagttgcaggccaaatgtggaaaatgacaacaaaaactgaaggtaagagcatcattttaaaattaggtgatggaattaaacagataataggtggttgaaatggaaaatgatttatatcctgttgaaactagagatgaattaattaaattaattttatctttggcttcggaagcaagaaataatcctgatgagtgggagaataatgatcttccatcttttttagaagcgatggcttcatggatggaagacatggatggtttttataagaatatgaataagccatgcccagataatgccagttggagtgtccttgctgacgtattaatggctgccaggatctacgaataactaaaacaagccggaatgatcataaggtatcttccggcttgttttacctgtcatcatgccaatatattcccctgctgaatcctaatcaccacctgaccgggcattacgctgatcgccagcggttgcccggtcaggccgcactgcgtcagccagtcctctggcagagacagattgccgttatcccgtatctagttcacgtaaccacagccagccagaacccggtttaaatttcgccggccagcttctggatgaagaatcggggctgcactacaaccgcttccgctactacgacccgcaggcctgctgttacttaagcccggacccgatagggctggcggggggcgagaatacttacgggtatgtacataatcctctgtcatgggtcgacccattaggcttagcaggatgttctaccacacttggtaggaacatgatggaggcgatgggactgccgcgttctacgaaatggactgggcatcaagcccaccatataatcccgaaagaattagctaaccatccagcattaaagaagatcaaatattatattgacgatgccggaaacggtatcttcctcagaagagtcgatgatggcactagtgcgatggcaaggcatcagggaagtcatgatggatatacacaagcagttaaaaatgctttagataaaatagatcttaatcaatctaaaggcgctattttgaatcaagtgaaagaaatccaaggaatttctcggaaagggttagagaatggccacccaatcagaccacttgatatggataaagcaggtggtgcattaggaaatggaaaggttaatgctgtctggactaatattttcactaaaggtggctggtaatggatcaaagatacataatcgaacctattgaatttgcatttacaaatgctctctttaaagggttgtctgaagctataagccagaaggttattgttattaataatgttgatgatgcttataagtatgcgtttgagcagaacctcccatcgggttataaagtttggaatgatacgattgaacaatgtcgtaaatctttaaggaaaaataagaagttccaagaggcttatgattttgttaatggtaatcttgaaagtttacaggttaaaaatgcatcatcacttattgagtttagaaagaagagaataaagaaaacgaataccgctcatgatgactttattttctctgaagctaaagaagatgcgttttttgtattgtctacagtagcggtcaatagatacttagataactttataaaagactcctttcttgaagatatatatgcactttacaaagcaggtgcgtggccgtgtggtatgaaaggaagtgtcatcttggtttttgacccagcatcgcttagttaatattattaactctttagattaaatgtgtaaataaaagccgggaagggcctctttgggtcttcccggctatttttttatctgttgttacgtcacagattaccctgccgaaccttaatcaccacctgaccaggcatcacgctgatcgccagcggttgcccggtcaggccgcactgcgtcagccagttctctggcagagacagcttgccgttatcccgtatctagttcacagcaatattatgatcttcaatatggtcaaggtcgtaaaactaggccaactgatatccagtatgtatcaaaatggaaataaaactcttgatgatttctttaggaatatctaatagataattcaaatgttgcagtggaaaaattgattcgtttctttgatgaaatgaataaatagcaaatgagatatctcgtatctttacgagaaggtgatgagaatgatgctgtaaaagcgaaagaagagtgggggttgtatgttttttgtgcgatcttgtttttttgtttacactcttaaattctatgtaattacatccatgaatttaaatcctaaaagtgacattttccaagcgtttaaaattattgtaattaaataacgttgttgtattttaaaagtgagtctttgattttttaaatgtctaaattggcaatgatggtgttgaattttttatattttaaatctaactatttcataattatatgctgttattttttattaaatagcaagtcatttttatcgctaatggtttgatagtgacgcgctattcatctatatcattagaaagaaataaaccttgaggtcagtttgtttaataatagaacccgagaaagcaataccgatgcaataaagacggagaatagcagtgtgaatcttagggtgatgtctgataaattataggcactagagataaaatagaatatgccatcgtggagaatataaactcctatcatcgatgggctgatataagctagtgtctttcttatccattcatatttagtatcaaaattatcaaagataacaaacagacatagactcaaaatgagtacatgaaagttatcaagaaaatagccagcattaaccgttttatacacgtgcagagacataaagctctcatagaaatacatcgatatagctgtagggacgatcaatagtttagccgctattctgacttttatgtttttagtgatttctctacctttggttgaacagagaaaacgtccgaccatatagtaaaatacccatgtccaaagcctgaagtactgggggaaatcgattaaataaggtctttcggtaaaagtactgataatatcaatggaaactgaaaagattaataatccacctaaggtaaagaaggtttgcctgttatttttaagtattttagatattatcggatttattacataaataagcgcgatgctaaataacagccagctttgcaggaaataaccttttttaaatccatcttcattgatgaagtaaaataaaacgttccagaatattatgattgttaaaatggatttgatctttcttaatatatcctgccttgtgatttcttcaatcgagtcaatataacctattatcatgaaaaacagcggtgttgctataatagataagaaatagaggatactcataacctcaccgcttaaaaaacagctgtcggaacaggttttactagcagagtagaatgtgaccgcagaaaagcagctaaggctctttagcgcatggaggccgacatttctcataattgaatcgtcacataagaggggagtccagagggcaaagcgatgccctttatcatctgacttggtgcaattttttttggctgactgtgtctgatcacataccgcagtttgttcattgtcacaccttgggtttgcaacagaaaactcgctatctcatctattcattttaagatatctttgcacaaaacgaaatttctgtcaccgttcatagtgactaactgaaattcataacatcaggtaggaattttgccatcactccctcgtttattccccctttgttcttaccttttaactctattttgccaatccgttaatttttattggtgtcagagtattcctacacaaaagcgtctcactgtcctatataacctaaaaatgccctgtgttttactgattgaacataaaatccgtcggtaagatagcggccataaattaaagaatcgcttctacaaccataaggaagttgattgcttaggttctcagcaaaaaagatcgcgtattggcgtaagtttgccttgaacccggattggtgctttgcacgttgatgtggggataggcagtccgtggcctgcatggagcctgatattacgggtaaaggcatggattatcttttttgttcgacgtcttattttaggatgtgagtaaaatgataagttgcatggtggtagataatgatagatatctgacccttgggatcatatctatggttaaaaaaatatttaccggaatgggaagcaaggaagatattaagttttataagcgtccattccatccagttgatgttgtatttatcggcgttgatgaatccaacttttttgaggcgttagcccgcctagagaaaatagcgctggatactaaggttttcctgattgcggatttaaggttaagtagtttctttcagggaatccccggattccataatgtcaccatgatttatcgtgaagaaactatagacagcctagagtccaaaattaccggcgttattaaacgaacattccgtatcctcactgaagctgcatccgatcgtaaagtagatcagcatgaagtcgttcagaatgatgagcaaaactttcttacgccaagtgaaaatgccgttctggcgttgttcaatgaaggcttttccggcggtgatatcgccaaaatccttaagaagagtcaaaagactgtgagcgggcaaaagcgctctgcgatgagaaagttgggtgtaagaactgatgttgaattgattaagatgtttatgttcaagtaaagaagtttagatatacatgcgtcaacgtctattgttgacttaaacatcgggcactgaatttgcctttttgacaccgatgacaccacggtgattgctaattttaccgtcaggagtttaaggggtactcagtccccatcgataggggactggtagataagagggttaaatatttttcagcttggctacagtgctatcaatatcgatttcgtgatcggagaaggtataagtcacgttttgatgagtggttaccgatagcattttcaggggaaccgttttttccgcaatgttttcttcctgcgggcgaattttattcatcaacagtccaacagaaagcacggtattagctttatccacctctgcctgagccggtacttctttagtaaatgttttgaaagacttaatgctggtaagtttgattctctcattggcaataaaaatgtatttgctctcaatggcaactttaactgcaaaagctgataaacctttgctgttggtcgttggttcaaaagtcacttccgcatttttcttaatcatctcgggattagcaactttaataacgtgaaaataacggttatctccgttttcatcggtgataaaaccaaaacctttatcttcaaaaaaagttgttattctaccgttcatcatgtatctcgtttaagccagtctattagttgcctatgatacaggggaatgctttacagatacagcctgagacctttgccacgtttattagcattgggaatcaccatagatttggttgcaacttaggcagaaatgcaaagtattcacactgacagtgtggcagagattggtgattctatctgtttttctcttttttgtgatctacattctggacaaaacatcgttcaattgctgtactgtaattgacacggttgttgtgtccaactattcacgtaaaggtatgtttgatgtctaagattaaaggtagcgttaagtggttcaatgaatccaaaggtttcggcttcattaccccagaagatggcagtaaggacgttttcgttcatttctctgccatcgctagcaatggtttcaaaactcttgctgaaggccagcgtgtagaatttgaaatcacgaacggtgccaaagggccatctgctgctaatgttatcgctatctaagtagccaatattcttaaaaacccgccccatgggcgggtttttttatggctgaaaatagagccagagcccgttttcgatgattacagtatgagatgaccgtccgataaaacctgggtctggttgttgagattcaggcagtgaggctacagctcatcttaaacgttatcttgaaatactagaataaataaaccttcaggaatgccagcgagatcaatacgcaaaggccaaccatcagtaattctgttagtgttttaggtgatccaaacatgttatttatcccgcgtttcagtgcattaaggtgaaactgttctcaggatacggattatctaatttgaaacttaagaaaacattaaggggataaatagcgcacttaaaagtgagaggagtccccgatttttgcttttttactgtgcgctccacatgttcactaacataaaggccagcattgtcatagctaacgaacccgccagattgaataatatagtcagcccggcccaaatgaatttactgtcttgtagcaagtacaccacttccagcgaaaaagttgagaatgttgtcagcccgccgcaaaagccagttgttattagcattttccaaactggatcaaggtgcgtcattcgattgaataaggctaatgtcaggccaataataaaagcgccaaccaggttaacagtgagagtgccaataggtacgttgggagataacccgtttaatttcatgctgataagccaacgtagcgtactgccaacgccaccgccgataaagactgccagtaatgtggggaacataaacacctttcttgttatcagggagtttgcagaaaggcttaggcgtaattctacgcacctttctgagaaggtaacgtagacatcatcagccttgaggggcggttatggaggaatgtcatctccagagctttaattggatattacactgactttttcttattttaaaccctgaaagtttggtagcctattcgcgattacatcgtgatacttaaatgaccaaggaacaagcgtgaaaatccgaaaggtgaaacccggtgacgaagctgccatctctgaattattgatagcattagattatgcaggaacagatggttttttaaaccagcgtttgctacagcttattgggcatcccgatagcggtttgctggctgcgactatcaatgatgttgtttgcggttttatttcattgcattttatcccgcagatcgcgctggccggtgatttctgtcggatcagttatttatgtgtgagtgagaaggtcaggggagcaggaatcggtaagcaacttctggatgaagctgaaaagatggcgcgcgaacgtggctgtgatcgtatggaattacacagtcattcccgtcgagtgaaagctcatgctttttatctgcgggaaggctatgcagaatcaccgaaatattttaccaagtgcttaactgaataggtatttagctcgctagctcaatacggtctctgccattatctttagcgtgatataaagcggagtcagcggcttttaaccactgttgataattggtcatttctggtttgaattctgatacaccagcgctgactttgagctgcagccccggcgattgattaaagacaattccagccagtttttcctgaatacgccctaatacctcgcaggcctgttccgccgaagtattagggaggatagcgccaaattcatccccgccgtagcggccgacgatatctacggctcttagccccaataatagctcctcggcaagcgccgtaatggcatcatcaccaaccgcgtgaccaaaagtatcattgatggttttaaatttatcgatatccagcagcaccaaggacgcgctgtgtttatagcgacggcagctatcaaactgattatgaagctgatgttcccagtggcgtcggttatacagcccggttaatccatctctcacgctaatacgcaaaagctcctctttgttatctgccaggcgtttggctgtgcgatacgtcacccaaccaagtaacgatggataaataaaaatcatcggtaaacagctatatacctgaattggtgtggtttgcggctggaaaggtagttgaaatatccaggcgaccagtaagcaacctattatctgtaggccaaggcctttaagaaaaaaagattttccgcctgatgcgatattgttcatgctcatcatcgataagatgaccacggagggcagggcattaaacgacattaccgccacccatacgccgcctgaaatagaatccaggcttaaattcagcatttcctggcgatgcggggaattggctcgaagggataattgataggctaggtgtggccaaattaacccgtttatgactagcagtgcccacatccacaacggagtttgtcgggtgattagcactgataagacgcataacataccgatacccaagccaaatatccggggtaggtagatgcggcgggcaaaactcaatccggcctcgcgcgaatttgctctgctatataaggacaattgacgcgctccgaataaatctgattttggggaatgttaaagaatcgacattcagcatgagtcagaatttaattaagcagactcctgcataaatcatagttcaggaacgaaatctgttacatattactgttgttttatccggtattttattcgtaaataatccacaattaagttaatcctattttgagtcctgaacgaataagaaggtatgtatggaaggtatcagtattaccaagctcttagtggtaggtatattgattgtgctgctgttcggcaccagtaaactgcgcactttgggggctgatttaggtgcggcgctgaaaggctttaaaaaagcaatgggcgatgataaagctccgccagccgatatcgcagaaactaaagttgtgccgccggtagagcataaagactagttctagttttatttactgcatggaaattgcagatggtctgaatgaaaacggatatccaggtggagatccgtttcaggctatttgcgatttgagttgtaataaattatgtctatttaacgcggtttttcgcaactaaaaaccagcccagatatgaattcaggcttatatgattatttgacttcctcgcctttggcttgcaagtccgcatgataagaagagcggacgaaaggaccacaggctgcgtgggtaaagcccatagccatggcttcggctttcatctcatcaaactcatccgggctgacgtagcgctgaaccggtaaatgatggcggctaggctgcaaatactggcccaaagtcagcatggtcacgccatgacgacgtaaatcgcgcatgacttcaacgatttctgcgttggtttcacccagacccaccatcagaccagatttggtcggaatatttgggtgcgcttctttgaaacgttccagcagcttcaatgaccattcatagttagcgcctggacgaacctgacgatagacccgcggcacgttttccaggttatggttaaacacgtcaggcggcgttgcagtcagaatatctaatgcgcgatccatacggccacggaaatctggcactaatgtttcgatcttgatcgttgggtttttggcacgaattgccgcgatacagtcagcaaagtgctgagcaccaccgtcgcgtaaatcatcgcggtcaacggatgtgattaccacgtaacgcaaccccatatctttaatggtttgcgccagcttttctggctcgttggcgtctggcagagttggacgaccatgcgctacgtcacagaacgggcagcgacgagtacagattgcgccgaggatcataaaagtcgcagtgccgtgattgaaacactctgacaggttagggcaagaggcttcttcgcaaaccgaatgcaggccgtttttgcgcatcgccgctttgatgccttgaatacggctggaatcagcaggaagcttgattttcatccactcgggtttacgtaacagctcctggcgttcagtcaccacggttttcaccgggattaacgccattttatctgcatcacggtattttacgccgcgttccatctgaatcggtttactcataatcgtgcaggttccagttctgaatctctaatatgagatttttcattaaaatcaacgaaatgagacattcgttaaaaattatttgaaaattgtttaaaaattatatcatctttcccccgattcgttcagcccccaattttgtatgagtttgtgctttcaggtagcagaatcctacgggagaaaccttataaaggatgataatcctctgcctgccaaggctgaagaacggcatccacgtagcccaattggcgaataaactcttgcaccagaatgggttgcacatcgctgagcgttgttcctggccggtatgcactcacttgtgtcatctccataccggcgttaccgcaagggtttatgcgctgaaacggtgacaaatccatatcgatattcagcgctagcccgtggaacgagcagccttgacgaatacgcaaacccaaagagcagactttcttttgcccgatatagacgccgggcgcatctggtcgggcgtgggcctcaataccaaagtgagccaaagtttctaccacggtattctcaatcgcggtaaccaactggcgaacgccgatctttgcacgtttcaaattgatcagaacatacattacctgctggccggggccatggtaggtaacctgtccgccacgatcgctttgaatgacagggatatctcccggcatcagcaggtgttcggctttcccagcttggccttgcgtaaatacctgatggtgttctactagccagatttcatctggggtagtttcatcgcgacattcagtgaaggcgtgcatggcttgagatacaggtgcatagggttgtagccctagctggcgcaaaatgatcttgtgttgttgcaagcgagacatcatctggttacagaaagggtggcgtcagtataccagcaccaccgcagggaaccagtgttgaccggtgaaaaaacggaagtgtgataataattacgcatgaatcacggatatatagataaaataaggcccgagttaattcgggcctctattcgttttttacgcggtgttacagcgcaaaaatctatgggtatttatattgaatcaaatagatatggtttaaattacagaaccatacgaaccagttcaattttacccagttcttcatacagggtttctacctgctcaatgtgttctgcattgatggtgatagagacggagtgatagttgcctttgctgctcggttttacctcaggggtataatcgcccggagcatggcgctgtaccacttcaaccacctggtcaaccagctgtggttcagcaatgcccatcaccttgtaggtaaaggaacaagggaactctagcagttcgttcagtttagttttcatgtgcgctcctgggttgcgaccggacagttgataaggcgaaatgcaaatcacttccggcattaaaaattataactcccgccggagcgggagcttcataatatttataatatgggggcagtcttcagactttcaagcctgtgaccttagccgaaccaatggtggaacatcagtttgatgtaatccaccatgcggctgaagaaaccaccttctttcacttcgttcatcaccaccagcgggcgttgttcgatagttttgccgtccaactggaagttgatgctgccaactacctgattttttgccaaaggtgcgtggatttctggcgtgttcagcacgtagctggctttaagatctttcatacgaccgcgcggaatagtcagataaacgtctttatcaacgcccagctgtacgcgatcggtgtccccgaaccagactggctcagaagcgaactctttaccgactttcaatggcgctacggtttcaaagaagcggaagccccatgtcagcagttttttgctttcggtttcacggcctttgtaggtgtgaccacccagaaccgcggaaatcaaacgcatctggccttcggtagcggaggcaaccagattgtagccagcggcttcggtatggccggttttgataccgtcaacgttcagactggtatcccacagtaaaccgttacggttcatctgacggatattgttgaaggtgaattctttttctttataaatggcgtattcgtctggaacgtcgcgaatcaatgcctgaccaatcaacgccatatcacgagcggagctgtattgaccttcggcatccagaccgtgaacagttttgaaatgggtatttttcaagcccagcgcattcacatagttgttcatcagattcacgaaggaatcctgactgccagcaacgtaatcagccatggccacgcaggcatcgttaccggattgcagattaataccgcgagtcagtttggagaccggaacctgatcccccggtttcaggaacatcaatgacgaaccctggaataccggattgccggttgcccaggcgtctttgcctacggtaaccatgtcttcggggccgattttcccagatttgatcgcctggccgataacatagctggtcatcattttggtcagactggcagggttacggcgcgcatcggcattcatttctgccaatacttttccggagttgtagtcaatcagtacataagcttccgcgtcgatttgtggcacgccgggaatcatggttttcatattgacgtcgtcggcgttagcaacagaagctgcgctcatgacgataacggtgccgagcgttatgctcttgataaaacgagaagtagttacatatttcatgatcaggacaacaacatccgtggggtaagttaagaacgtgccacactatagcagatgaggtcttggcagacatcaggcaatccccatctcttgcggcgtttacacatttttacgtgtgggtggcaacccgacattttaaagcctaaccttctgtttatacacagattaggctctaatttttcttgaaacagcaaaattgctacaaggcgtttccaaaagaatcagatagccagttattatggctaactacggcgcagtgatgataaatgactgctgctgcgcttctgaagataaacgctgttgcagttctgcggcctgttggcggctgctgaacgggcctaactgtacccgatgaacgtttccagcgctggacactttacccggtacgccaaaacgttggctcagagcctgctgccaggtagaggcgcgctgggcatcgcttaatgccccaacctgcacgatgtaagcaccggaagctgaagcggatgatgccgcaggagctaccgaggttatcggaccgggaggactgaccaccggcggcgttaccggctcggcgctttccagcacgccggaaggcaacgaggacggcgcacgtaggaaaccgctgctttgcgcggctacgggctgcgcggcatcggcaccggataagttgctgttttcaattggacgaaccggcgcgtcgttgacgggggcgtcctgctgaatggggttgcccatcgctccagacgttaaatccgggcggcttggcagagcgtagctttgcttggcaatagtggtcccaaccatacctgggccggagagggaaccgtcaggtgaaacattgataaaatcaattttcaccttggtattgttagagatattcaagcgatctgctgcagctttggataaatcaatcacacgtcccggagtataagggccacggtcattgacccgcaccacgatttggcggccattgctcacgttggtgacccgcacgtagctaggaataggcagggtagggtgagcggcggttagcgcattaggatcgaaagtttcgccggtggcagtcgtgttgccattggcttcttcaccataccaggcagccagaccggtctggctgaagttttgcggatctttgatgacgctataggatttcccgttcactttgtaatcctgattaaaattaggattaaaaggttcataacgaggttccgctccgccgatctcttcaatcggcccattataagtctgctgagtttgttctataggtgcttgattttccgtagtacaagctgataacagcacgctgacgacgccgatccaaagccattccttacgcattgctcacctctataaatttttagataacatttttcgatgagtatgtatcgacatcacgataccaaacccggccatcaggactatcagcgccgagccaccgtagctgaccaaaggcaaaggtacgccaactacgggtagaattccactgaccataccaatgttaacaaacacatacacaaacagtatcagcatcagcccaccgaccatcactcggccaaaggtggtttgcgcatgagcggcgattaccaacccacgcataatagtacaaagatacagacccagcagaaccaatacgcccaccagacctaattcttctgctaataccgcaaaaataaagtcggtatggcgttctggaaggaattctagctgggactgagtgccctgtagccagcctttacccactaaaccgccggagccgatagcgattttggattgaataatatggtagcccgcgcccaatggatcactttccggatccagcagcatcatgacgcggtcttgttggtaaccgtgcatcaggaagaaccaaagtatcgggataaagcaggcgaccagtacggcggcgatggcaatcaaacgccaactcattccggccaggaacagtacaaataatccggacgctgcgaccagaattgacgtcccgaggtcgggctgagcagccaccagcagggttggcataaagatcagaatgagtgcaataccagtattttttaatgttggcggacaaacgtcccggttcataaagcgcgccaccatcagcgggacggcgattttggctatttccgacggctggaagcgcacaaagccgagatccaaccagcgctgtgcgcctttactgatttggccgaaggcatcgaccaaaaccaataaaatcacgcaaacaatatacagataaggtgcccagctttcgtagacgcgcggaggaatctgcgccattacgatcatcacgcacaggccaatggcgatttggccgagcttgcgctccatcatgccgacatcctgtccgctggcgctccacatcacgaaggcactgtaggccagtagcgaaagaatgcagatcagaaacggtagatcgatatgcattttggaccacagagatcctttttgttggcgttcagtcatgatgtaccttaatcaccttcagtgccgggaggcgtcggtgccgcatccggtaattcagtattattatcacctaacagtatgtgatcgaggatctggcgggtgatagtccccacagcaggacccgcgccgccgttttccagaataatcgctacggctaccgtcgggttatcataaggggcaaaggccgtcatcagcttatggtcacgtaaatgctcggccactttgtgcgcgttataggtctcatagctgtaaacctgcgcagtacctgacttggctgccgctttatacggtgtaccttcgaaaaatttacggcctgtgccgttcgggcggttggctacgccatacataccgtctttcgccagttcccaaaagcctgagtgaatatcgccaatctggatctgtttttcctgacgataaggcaccagcacgccgtctactttggtatttagtagcaaatgcggatttttcacatcaccgtcattgattaatgtcatcaacgcttttgccatttgaatgggtgttgccgtccagtagccttgaccgatacctacgggaatagtatccccttgataccaaggttttttatggcgcttttgtttccattcacgcgttggcatgatgcccgcacgttcttctgataaatcaatgccggtatattcgccatagccgaatttgctcatccattcggaaaggcgatcaatccccatgtcataagcaacctgatagaagaaggtatccgctgattcttcaatggctttggtgacattcaggcgcccgtggccccattttttccagtcgcgatagcgtttttctgagccaggtaactgccaccaaccgggatcgaataggctggtatttttattgatcacgcctgcgcttaaagccgaaacggcaatataaggttttaccgtagaagccggcgggtaaacgccttgagtcgcgcggttgatcaacgggcggttcgggtcattgagcagaccctgataatctttgttggaaataccgtcgacgaacaggttcggatcatagcttgggttggataccagcgccagaattccgccggtgcgcggatcggtgaccacaaccgctgcgcggctaccgcttagcagttgttcaatataggtttgcagatgcagatccagcgtcaggtaaatatctttacctgcctgcggcggttgctcatgcagttgacgaataaccctgccacggttatttacttctacctcttcataaccggttttaccgtgtaataccggttcgtaatagcgttctatacccagtttgccaatatcgtgggtcgcggcgtaattggccagaatgccttctttatccaatcgctcgacgtctttgtcgtttattttggatacgtagccaataacgtgagtgagtgcggaaccgtaaggataaaagcggcgttggtagcctttgacttcaattccgggaaagcggaattggttaaccgcaaagcgggcgacctgaacttcggtcagcggcgttttgacagcaatagaggtaaagcgtcgggaacgtttgcgttctttttcaaagttcgcaatatcttcatcagtcagatcgacaataggacgtaatgcatcgagagtcgcttttagattctcgattttctctggcattaattcgagctgataaatcgtgcgattcatcgccaaaggaatgccattgcggtcatatatcatgccgcgactaggagcaataggaaccagttttatgcggttttcattagaacgggtgcggtaatcttcaaagcgaacaatttgtaaattgtacaaattggcgatcaacaccccgataagtaaaacaatacctagaaacgccacgagagcgcggcgcacaaacagggctgattcagccgtatagtcgcgaaaagggttacgttcttttttcatcccgctaaacacttactctggtcaaagtcaccacgttgctcaggctgatcacccgattattcccggtggtaaggatgattggtcgtaatactccaggcacgatacaggctctctgccaccagtacgcgcactaaaggatgaggtagcgtcagcggagagagcgaccagctctgctctgctgcggctttacaggccggagccagtccttccggcccgccaataagtaggctgacgttgcggccatcctgcttccagcgttccagctgatgggctaactgaggagtttcccagggcgtgcctgggatatccaaagtgacaatgcggttgtttttaccgaccgccgccagcatcagttcgccttctttttccagaatacgtttgatatccgcattcttgccccgttttccggccggtatttctatcagctcaaaaggcatgtctttaggaaaacggtgcagataatccataaagccggtctgcacccagtccggcatcttagtgccgacggctaccagttgcagtttcactctttagccccagagtttttcaagttcatacaggcgacgactttcttcttgcatcacatgtacgataacgtcgcccagatcgacaacgatccagtcagatacgccctggccttcgattcctaatggaatcatgcctgctttacgggattcttgtaccaaattatcggccaaagccataacgtggcgggtagaagtaccggtacagataatcatgcaatcggtaatgctggatttacctttcacgtcgatagaaagaatgtcttggcctttcaagtcatcgagcttgtcgataacaaattcttggagcgctttaccttgcaaaggttccccctcaggtgatttatgtccataaccttcgctgataatacgtttcgccggaatttcttctcagcacgcaatctgttacgagtggttatgatgtatttatcggcaggatgccgctgaaagccagctgtttactgcaattgctacaggggttttcagcgaatacctaaaattaagcggcgaagtatatcatgggactaaggctcgcgatataaaccctgtaactcgatgtatcgctgaattgcgcgcggtaacaggtcatcacagcttagtccttcacgtcgccgccggcgaatctccgtagcggatatatccaaaagtggagtatctgccagatagataaagccattgggttgctggctgagtttttctggttgcgtaacctgatgttgttccagccagttttgaagctcaggtgtatccagcttcttggcataaccgggacgagcgcagaccagcaaatggcaaacatccaacagcgattgccagcggtgccatttatgcagagataataatgaatcctgaccaatgataaaagccagtgctagttcgggaccgcgttccgcacgtagcgattccagcgtatctatggtgtaagacggcgtggtgcgctgtagctcgcgatcgtcaacctgaaatagcgggtttccctcaatggcgagctttaccatttccagccgttgttgcgcagaggcttccggctgtggccgatgaggcggaacgtgattaggcagcaaaataacctgctgtaatcggacttgctgcgccaaagcttccaccggacgtaaatggccgtaatggatgggatcaaaggtgccaccaaacagagcgtgtaagctacgctctggtttagcgctatcagcctgcttatccagcatcaaagaaactctcaggtaaggttttgccacagatcagcatggaaagtgactctaactcaggccagacagactgaccgtagtcctgcttgaggcgaatctccatttgcgttagcaaatgcacactgcgctgtaattgttgcaacgtgagacgctgaagcgcctgtgtcatcagatgacggcggttttgccagactttatgctgatcgaatagggttcttagcggcgtcgtcgccatttgccgttttaagttcagcagtagcaacagttcacgctggatggtgcgtagcaaaataataggttcgctatcttccaaccgcagttgctgcaaaatatgccaggcccgcttacttttccccgccagcaatgcatccagccaatgataaggtgtgaaatgcgccgcatcattgacagcttgttctacgcgcggcagggttaacttgccgtcgggatagagcagggagaggcgttccaatgcctgggataacgccagtaaattaccttcatagcaataacaaagcagttgaatagctgcatcatcgacttcgaggttgagacttttggctcgggtttgaacccagcgaggaagctgagcctgttccggtgtctggcagctgattaatgcgccttttggactcagagctttaaaccaggcgctgttttcctgcgctttggtgagtttgttggcacgcaatatcagaagaatatcggggtgtagcaggcttgtcagtttagctaactgttcgttcatagcggcggttaaaccactatcagggaataccagcagcagagtttggcggctggagaacaggcttagagcctgacaaatgctgaagatattctcccattcggtatgggtatctaacgctacggtgtaatgttcggtaaaaccttgctgcgatgcagcctgacggatgcgatcctgactttcctgtaacagcagcggttcgttcccacacagcagataacaagcgcgcagcccctcttggagctgcgcggcgagttgttcaggataaatacgaatcattgggcagaggcaactggagtcactgttttggccgtagccggcttagcgtcttcttcctgtgcctttttcacttcttcagcgtgtacggtcagtaatttccgcactaactgttgagcggcctgctcacgcatttcctgcgcaatgatgtcactttctgccgtttttgctaacgcggttaacgggttatcaaagaaggagcggaaaacggtcacattcaacgggtaaatatcgtgcccaggaatcagcacctgcgcctgaacattcagtaccatttggtattctgcggtcacgccgttctggaacaccgaaacggtgtcctgactttgcgacgatcccaaaatacgcagcgtcggcagatccttgcgcatcgcatcgtcaacaatggagacgttgcttagacgcagctgttgacgaatagagcgcgtcaatggcccataaggatcgctgctttgcagcaacattttttgcagttcctgaggcacttgtgtagtgccccgcagatgaaaaccgcagccagcggtgaccagcaccgctaaccccagcaacagcgtcagaatacgatgtcgcacaactcctccttgtcttaacctacaaccaggttaagcagtttgccagggacatagatcactttacgaatcgtaaccccatccagatattttgccaccagacgctcctgacttgcgcactcgcgtacgtattcttcagttgcatcggctggcacggtgatcttgccgcgaaccttgccgtttacctgtaccacgactaacttggaatcttcaaccatggcctgctcatcagccattggccaaggagcggtatcgatatcgccttcgccgcccagttcctgccacagagtgaagcagacgtgaggggtgaacggatacagcatacgtaccacggccagcagtgcttcttgcatgaaggctcgatcctgctcggtttcctgcggcgcgcgacccagtttgttcatcagctccatcacggcggcaatcgcggtgttgaaggtctgacggcggcctacgtcatcggtcactttagcaatggttttgtgcaaatcgcgacgcagtgatttcagatcttcagtcaggctggcgatatccagcggctgtgtagcccctttgctggtgtgttcaaacaccaaacgccatacgcgcttcaggaagcggttcgccccttcaacgccagattcctgccattccagcgtcatttctgccggagaagcgaacatcatgaacagacgaacggtatccgcgccgtatttttctaccatgacttgcgggtcgataccgttgttcttcgatttcgacattttgctcataccggcataaaccagttcatggccttcgccatcaacggctttagtaatacggcctttgtcatcacgttcaacaatggcgtcaaccggagatacccagatacgctcgccgttgctaccggtgtagtagaaggcatcggccagaaccatgccttgacacagcagacgcttggctggttcatccgaatccaccaaacctgcatcgcgcatcagcttatggaagaagcggaagtacatcaaatgcatgatggcgtgttcgatgccgcccacatactgatcgaccggcagccagtagttagccgcagccgggtccagcatgccgtcatcatattgcgggcaagtgtaacgcgcgtagtaccaggatgattccataaaggtatcaaaagtatcggtttcacgcagacccggcaatccgttaacagtggtttttgcccactcggcgtcggctttgattgggctggtaatgccgtccataaccacgtcttcaggcaggatcaccggcagttgatcttctggtgttggaaccacggtaccgtcttccagcgtgatcatcgggattggcgcgccccaatagcgttgacgggagacaccccagtcacgcaggcggtagttcactttgcgttgacccacgccaagcgcgaccagtttatcggcgatagcatcgaaagcagcttgataatccagaccgtcgaattcccctgaattgaacaaagtgcctttttcgggcagtggcgcagcgctcaaatcaggcgcggtgccttcggcggtcagaattaccggctgaattggcaggttgtatttggtcgcaaactcccagtcgcgctgatcgtgacccggaacggccatcactgcgccagtgccgtaatccatcaatacaaagttagcgacccagatcgccacttcttcgccagtcaacggatggatagcagacaggccggtggccatgccttttttctccatggttgccatttcggcttcggccactttggtgttacggcattcgtcaacgaactcggccagcgccgggttggttttggctgcttctagcgccagcgggtgaccggcagcaacggcaacgtaggtgacgccaaagaaggtatccgggcgggtggtgtaaacagtcagtttttccgcactgttagccacgtcaaaggtgatttccaccccttcagaacggccaatccagttgcgctgcatggttttcacctgctctggccagctttccagcttgtccagatcgttcagcaactgatcggcataatcggtgattttgataaaccactgcggaatttctttacgttcgactttggtatcgcaacgccagcagcagccgtcgataacctgttcgttagccagaaccgtcagatcgtgaggacaccagttcaccgcggaggtctttttgtagaccatgcctttttcatacagcttggtgaagaaccactgttcccaacggtaatagtcaggtttacaggtggcgatttcgcgatcccagtcatagccgaagcccagcagtttcaactggttcttcatatattcgatattgtcgtaagtccacggagctggcgcggtgttgtttttaaccgctgcgccttcagctggcagaccaaatgcatcccagccgataggctgcaggacgtttttacccagcatacgctggtagcgcgaaatcacgtcaccaatggtgtagttacgaacgtgacccatatgtaggcggccagacggatatggcagcatagagagacaatagtatttctctttgctcgcgtcttcagtcactttgaaagtttgcttcttttgccaatgaagctgaacgtgcgattcgatatcttccgggcggtattgctcttgcatggcagccaatggtcctatagtgaaaacagctacacctgtagcatcatctgtttaatatcataaagtgagatccgcatagcatagctgataagcggcagccgcaacaacactctacgggtcactgtcgcgtttttctgcgcgacctatagcatttacgggcagagtgaggacggtcacaccctaatgatcgcgtgacatcaggtatttacggctaaaataaatagagatacctttaattatcaggcgaaagataagctttatcacaggttactcgaggagactgtatgaacaaggtggctcaatattaccgtgaattagtggcatcgctgaccgagcgcttgaaaaatggagaacgggatatcgatcaactggtcgccagtgcggaacagcggctgaacacggtagaagatttaacgcgcagcgaagtcgatcagattactcaggccgttcgtcgggatctggaggagtttgctcgtagttacgaagaaagtaaggaagagtttaccgatagcgttttcatgcgggttatcaaagagagtctgtggcaagaattagccgatattaccgataaaacccagcttgaatggcgcgaagtgtttaaggatgtcagccaccacggggtttatcacagtggggaagtggtcgggttaggtaatctggtttgcgaaaaatgccaccaccacttagcgttctatactccggaagtattacctctttgcccaaaatgcggtcacgatcagttccaccgtcgcccattccagccataaccttcacttctagacactccgcctgcgcggagtgtcataaaaccattattttccgtagcgagacacgcgctcaaccagtaaatcaataaaaccctgccgatcaatatccatcaatatttgcgtattggccggttttcccgtcaattgatagaaatccgttaccgtcatgccttgcgtgtatttgccctgagtctctattccaacccaacggtcaacgctttggaacagctcgggagccaagagccaggcaatggtgcaaggatcgtgcagtggcgcacctttaaagccccagcgttcctggcgatgataaagcataaagaaatctaatagaccggcaaccacgtcggccaccggattgccaagctgacggaaacgttcaatatcctcgctcattacctgcgctttatgggtgacatccaacccggccatggtcagaggaatgccggattggaatacccgttcggcggcctccgggtcgacataaatattaaactctgccgctggcgtccaattgcccaacatcaccgagccgcccatgatcacgatgcgttcgatttttggcgtcagttcggtgtgactggcgaggaataaagcgatattggtcaaaggacccgtggctaccagcgtgacgggacgcgggctggcgcgcagaactctggctatcagttccaccgcattttccgcttgcggcgcaaaatctggctcaggcaaaaccgggccatccagcccactttctccgtgtacgttatcggcgatgataagttcgcgaagcaaaggtttttgcgccccaccggccacgggaatatctcgacgtttcagcaaagtcaaaatgcgcagtgcattacgcagcgttttttccggtgtttgattaccggcgctggtggtcacagctgcgattttcagttcgggggaggcgagagccagaatcagtgccatggcatcgtcatggccgggatcacaatcgataataatagagcgggacatagggtttcctcttgttgtttctatttgttgtcgacaatggacaaaatagtcaaaagaggcaataaacggcactgaaaaacaagaggggatatccgaatcctcccccgaaagggaggataattattggctaggccttagtgcagaatcttggcgaggaagtctttcgctcgctcagatttaggattgttgaagaaatcgtccttattactgtcttcgacaattttcccttcatccataaagatcacccgatgcgccactttacgggcaaagcccatttcgtgagtgactaccatcatcgtcatgccttcgtgagccagtttgaccatgacgtccaacacttcattgatcatttccggatcgagcgccgaggtcggttcgtcaaacagcatggcgatagggtccatgcacagcgcacgggcgatggcgacgcgttgttgctgaccgccggaaagttgagatgggaatttgtcggcgtgagtcgttaacccgacacgttccagcagttttagccctttttcccgcgaggcggctttatcgcgtttcaatacttttacctgcgccagcgtcaggttttcgatgatcgataaatgaggaaacagttcgaaatgttggaaaaccatgccgactttggaacgcagctgagccagattggtgcctttatcattcacggcgataccgttaactaaaatattgccttgctgaataggttccagcccgttgacggttttaatcagggtggacttgcctgagcctgaaggaccgcagactaccacgacctcaccttttttaacttcggtggagcagtcgctcaaaacctgaaagtgaccataccacttagaaacatttttcagggaaatcatcaaacagtccttttcttcaaatagttaaccagcatcgacgccgcaatactgataacaaaataaaccaaaccggcgaacagaaccatttcgacctgagtaccgtcacgctcaccgatggtggtcgcggtgcggaagaaatcggccagactaagcacatacaccagcgatgtatcctggaatagcacgatgccctgagtgagcaagagcggaaccatcgccctaaatgcctgaggtaaaataaccagacgcatcgattggccttgggtcatccctaaagccagggcggcggatgattgtccgcgggaaatgctttgaattcccgctcggataatttccgagtaatacgccgcttcaaacagggaaaaggctaccatggctgagatcagccgaatatcggtttttggcgatagcccaagcacattttgtaataagcttggaaccactagatagaaccacagcaataccatgactaaaggcactgaacggaatagattgacgtaaagggtggcaaaccagctgatcgctttgatcgacgacaaacgcatcaccgccagtatggtgccccacagaatgccgaaaacgatagcaataacggtaattttggccgtaacggccagcccttgtagcaaataaggcatgctgggcgcgatggaactccagtcaaattcgtacattatttactccccaaattgccgggtaactgcactttcttttccaccaatcgcataatcagcatgataacggcgttaattaagacataagccaacgtgatagccgtgaaggattcataggcatgcgcggaataatccagcagtttaccggcctgcgccgccatatccaccagacctatagttgatgcaatcgccgagttttttaccagattcagcatttcggaagtcatcggcggaatgatgacgcgataggcattgggcaataatacatagcgataggtttgcggcagagtcaggcccatcgccagcccggcggccttttggcctcgcggcagggattgaataccggctctaacctgctcacagacgcgagccgcggtgaacagcccaaggcatagcatggaagaaaggaaaaactgtatattcgggtctagctcagttttaaaccacatgccgatatgggtcggcagcagttcgggaaccaccagataccaggtaaagaattgcacaatgagcgggacgttacggaataactccacgtaacaggtaccgattgatgacagaagccgattggggacggttcgtaaaataccgaacagggaaccgacgaaaaaggcaataacccatgcgctcaacgacagcgcaaccgtgacctgaaaaccagaccagatccagcctaggtaggtggtgttaccgaatggggcgggttgaaggaaaatcccccaattccagtctatagacatagctaactcccttaaaagggtggagaaaccaccctgaagactgatgatgaatagccgcaccgcgctgaccaaaaggaaacaaaaaaatgcggagtggggaacggccaccccgcatcctgtctaccaagcggtcatcatcaatcaccaggacagcgtactgccccggatattatttttagttcaatgccttgtcgttaggttctttgaacagctttttcatgtcatcagacagagagaaattcaggttcagatttttcggcgggataggctgcgtgaaccagcgctcaaaggatttggttgctacgccagaagtttgcgcgttggcaatggtttcatccattaacgctttaaactgcgggtcatctttacgcaacatacacccgtaggcttcctgagattgcggtgtacctacaatctcccaatcccctgatttcttggctttggcgcgttcaccggccagcagagcgtcatccatcataaaggcgacggcgcggccgctttccagcgtacggaaggaatcaccgtgatctttggcgctgataatgcgcatgttcattttgttttcttcgtttaatttgttcagcagcacttcagaagtggtaccggaagtcactaccacggctttaccagccaagtctttgaaatctttaacaccagagtcttttttggtcagcaaacgggtgccaaccacgaagatggtattggagaatgcggcctgtttctggcgctcgacattattggtggtggaaccacactcaaaatcaaaggtgccattttgcagcaatggaatacgattttgtgacgtcacgggaatcagcttgacctgtaaatccggcagattcagttttttcttcaccgcatcgacgatcaggttggagtagtcctgtgaataaccgaccactttctgctgattatcgtaataagagaagggaacggaagactcacgatggccaacgacgatcacgccgttatctttgattttcttcagcgtgccagccagttcttccgcatgggctacgctacttgccattccaactaacagtagcgataacgccagtttacgcatttgcatggtccaactcctgtgatgttatggtgctgcttgatgttgtgatgctgaaatcgtcttatctgaattgggtatatgacgaaaaaatcattaccgctttattaacgagcgatctcttcacttacttgtaacagattatcgcgataaaaacgtatcttgttatataaatgatattaaaatgtttgctttttgagacggaaatcgcaccaaataaaggcaattaaacaaagatgcaccaagttcgtgctgtaaatgcgctaaatttgtgcaataaaacggccagccttggctgagaataagaaaaccgaggaataacgaccagaatcacaaggaatattgcaaggcgtgtgccaattgtggctctcccgcgggaaacgggagagaaaatgcgggaaaaggcgactattcggttggagtgatctgttgggtaatagctaaatgggctttaaacacctccagcgccgatggaagctgttcttttttgagctgtttttccgggttccacagctcggcaaaagtaatggctcggccacagtgaataaagacttcggtaacctcgatcaccagaacgctgcgcgcgggctgcccattttgtgcaaagcggttgcacagttctggatcaacgctgatcttagcgcggccatttactcgaaaaccttcattccagccgggaatcaggaacaaaataccgaggaatgggttttgcagcagattacggatgccgtccagacggttatttcctgggcggtccggaaataataaggttttatcgtcttcaacatgcataaaaccgggttctcctcccttaggtgaacagtcaacgccgttggcaccaaaggtacctaaaatggcgaagggagaagcagcgatcagctttcgggcatagctatcgagatgatcaatctgcttttgcaccacgtttttattaggcgacgcatagtgctgactcaactgatcttcagttgtcaggataaattctggattcagttgcatacagtctcagttaatgattatgctaattattcgtattgatgagaacgataacagccgccatgccaatgcgcaatattaacgcaatacgggtaataaggccgcaatccgcttaaacagcgctattttgatacaaatttagcaaacatctcgtgccgtaatggcgttagcttgatgaaatttttgatgtttgacggggaaatgaatcgccgcaacgcagagatgctgcggcgattttttacgttgaatgaaccaaggatgcgttcggatcgattaattcttacctgaacgcgcgacgaaacccagtgtgatcacaccgaaaatcagcgtaatcacccagagtggccagccgccaaaacgggcataaggcgtcagaccggtggttggtgtcactttcacttccagcacctcgcgcgtgaactgcgggatctgagccaatacgttaccgtcagctcccaccgcagcggtgacgccgttgttggtgctacgcagcagaggacgacccagctccagcgctctcatgcgcgccatctggaaatgctgccatgggccgatggaatggccaaaccaggcgtcattggaaatggttagcaggaaatccgaattcgctttgaaattatctctcacctgttggcccagaataatttcgtaacaaatcgccgccgtcatatcaaaaccggctacggtgacctgtggttgcacatagctaccgcggctaaatgaagacattggcaggttgaataagggtgccagtggccgcagcagggcttccagcgggacatattcaccgaaaggcaccagatgatgtttgctgtagcgatttagcgtcggatattggtagggctctttatcgccgagcacaatcaggctgttaaagaaacggtagccatccggcgtattgcgagcgtcaacaataccggtaatcaggctactgtgattggcgcgcatcaagctgtccatcatggtcaggaaggcagtttgatcggtttcaatatcgggaatagcggattcaggccagataataatcggcgctttgcccatataaggttggctggcattcaaatacacttgcagggtatcgatcagtgccttcgggtcccactttaacgattgagcaatattaccttgcaccatcgccacattcacagcgcgttccggctgaggggtaaaccagtgccattggcgcagcggccagggcagcagcagtaatgccgtagcaataaccgctggcagccagcgtcgctggtggatcgcataagccagtaatccactgatggcgaccagaataaaggtaacgccatcgacgcctaaaatcggcgcaatgcccttcagcggcccgttaatctgggtataaccgaactgtagccaagggaaaccggtcagcacccagccgcgtaaaaactcgctcagttgccataagacaggcgcggcaatggctaagcgccaccaggtaggtttcgggcacaggcgggttagcgcaccggcaaacagcatggtgtagagcgacaaataggccgccagtaacactaccaggaataggttgaccatcgtcggcataccgccaaattcggcgatagtgacataaacccagtttacgccagtgccaaatagccccattccccagataaaaccgataaaggcagactgtcgagtactgcgatttaaagtcagactgagtaaaccaaacagggataccagcgaggctggccagaaatcgaagggggaaaatgccagcgtaccgctggcaccaaaaaacagcgccagtagggcgcgaacccactggcgattgaataacgaagcgttagccatcgagaatttattcttccaatttcggttgtggtgcatcatccgggattttaacgtgaacctgaataatacgtcggctatcagccatggcaactttgaataaataaccttcaatttcaatggtttcaccgcgcgcaggcagatgaccaaaggcttgcatgactaaaccaccgatcgtgtccacttcatcatcgttaaaatgggtattgaacacttcgttaaaatcttcgatttgagtcaatgccctgatggtgtaggtatgacgactgagctgacgaacgtcgcgatcttcttcgtcatcgtactcatcttcaatttcgccaacgatcagttccagaatgtcttcaatggtaaccagcccagaaacaccgccaaactcatcaatgacaatcgccatatgataacgttgggagcggaattcctttagcatccggtcgacacgcttgctctccggcacgacaactgccgtccgtaacactttgtcgatgctgaacggttcggaatctgtgcgcataaacggcagcaaatccttggccatcaggatgccttcaatgtgatctttatcttcactgatcaccgggaagcgggagtgggcggattcaataatcacatccaggcactcatccagcgtttggttacgcttgagtgtgaccatttgagagcgagggatcataatatcccgcacgcgctgctcggcaatgtccatgacgccttccagcatgtcacgggtatcgggatcgatcagatcgttctgttctgagtcacggataagctcgaccagatcgccacggtttttaggttcgccgtggaacaattggttaaggataagagtaaagaaccctttcttgggactggggctatcattgttttgtgaatggtcgtcgctcatggcgttttagttaagtttactcatgttaagtattgtcattatcagcagcgtaaatagcacgctgccaacgcattattcggggtctttttctgaaagatacgggtccggataacccagactttgcatgatttcagtttcaatcgactccatttcttcggcttcgtcatcgacgatgtggtcataccctagcagatgaagactgccgtgaacaaccatatgcgcccaatgggccaatacggctttattctgttcaacggcttcctgttcaaccacttggcggcaaatgatcaaatcgcccaacagcggcaattctatttcaggcggtgcttcgaagggaaaggatagtacgttggttgacttatctttaccacgataggtcaaattcagttcatgactttccgcatcgtcaaccactcgaatagtgacttcagactcttcctgaaactgaggcaatacggcttccagccagcgttggaagtcggcttcagttggcaaaccctgactgttttcacaggcaatctgtaaatctaatataacctggctcactgagcctcctgctctgacggggtgtggttttcacgcttgcgttgctcggcgctggcgtctttacgtttttgttctgctgcttcccaggcttcataggcgataactacccgagccaccacaggatgccgcactacgtcttcactgtggaagaagttgaagctgagttcctctacgtccgacagtacttctatggcatggcgcaaacccgatttctgatggcgaggtaaatcgatttgggtgatatcgccagtgatgaccgctttggagttaaaacctattcgggtgagaaacatcttcatctgttcgatagtggtgttctggctttcatccagaatgataaacgcatcattgagcgttcggccgcgcatataggccagcggcgcaacttcaatcacattgcgttcaatcagtttttctacgcgctcgaaacccagcatttcaaacagggcgtcgtaaagcggccgcagatagggatcgactttctggctgagatcgccgggcagaaagcccagtttttctccggcctcaaccgccggacgagtcagcagaatacggcgcacgttctgtcgttccagcgcatctaccgccgccgcaaccgccaaataggttttacccgtaccggcagggccgataccgaaagtaatatcgtggtcgagaatattggcaatgtattgcgcctgatttggtgtacgaggcttcaccatgccgcgcttggtgcggatatttaccgctttaccgtaatcggggacgctttctgccgtttgctccagcacccggctttctttcactgccaggtggatgtgttctggatcgatatcaggaacgacgccgcgaatcggtgcggtgtctacgtagaggtggcgcaggatttctgctgccgcattgacgcagatgttcttaccgaccagcttaaaacggttatcgcggcgattgatttcaatgcccaaccggcgttcaagctgtttgatgttgtcatcaaaagggccgcacaggctcagcaaacgctgattgtcggtgggctcaagcaggatttcttgtgtcgttacgtgcaaattgtttctctgagtcactgagtttctctaggtcacgtcgggccggttgatattgattcacataaggcgagtatttcttttccgttatgcctgatatcaataatacatgtcattccggaattattcatggtgagcgcagtggacgcaagcccactgcttgtctatctgtgcgatggtgcgcaaaaatcacgcgtcccacgggctgatggccttcaatgattcagtttgtgaatttttgaaagaaaatcatcaaaagtcattgggtcagactaagggtggtattgcactacgccaaggtcattttccttgcgggtacgggcaatcaccgactgcggcgattctacgctgcgtaaatccatttgatcttcggtccgtaccaccacgccgcgcagagagttggtgtagacatcaacaatgtcgacatcgacgaatttaccgatcatctccggcgagcctgcgaaattcacaatgcggttattctcagtgcggccagccagttccattacgtctttgcgtgaggtgccttccaccaatacccgctggacggtgccaatcatcgcctggctgaaattcatagcctgctgagtaatacgatcttgcaaaatatgcagccgctgctttttctcttcgtcggaaacatcatccggcaaatctgccgccggcgttccgggacgtgaagagtagataaagctgtagctcatatcaaaattcacttccgcaaccagcttcatggtttgctcaaaatcggcctgagtttcaccggggaaacccacgataaaatcggagctgatatgaatatccgggcgagccttgcgtaatttccgaatgatagatttgtattccaacgcggtatgggcgcgtttcatcatggttagaatacgatccgaaccgctttgtaccggcaaatgcaggaagctaaccaattcaggcgtatcttcatacactgcgataatatcatcggtaaattcgataggatggctggtggtgaaacgaatgcgatctataccatcaatcgcagctaccagacgtaacagttcggcaaaactacagatattgccgtcataggtagccccgcggtaggcattaacgttctgaccgagcagattgacttcccgcacgccttgagccgctaactgagcgatttcaaacagcacgtcatcacttggccggctgacctcttcccctcgggtgtaaggtactacgcagaaggtgcagtacttattgcagccttccatgatggaaacaaaggcggtaggaccttcggcgcgaggttccggtaaacggtcaaatttttctatttcagggaaactgatatcaacaatcggacttcgggttccctgaacgtggttgagcatttccggcaggcgatgcaaagtttgcggcccgaaaataacgtctacgcaaggcgcacgctggcgaatatgttcaccttcctgagaggccacacagccacccacgccaatgattaactgcggattggtttctttcaactgcttccaacgccccagcagcgcgaagactttctcctgcgccttttcgcgaatggagcaggtattgagcaacagtaaatcagcttcttcaggcacatcggttaactcataaccgtgcgtgctggccaggaggtctaccattttagacgaatcatattcgttcatttggcagccccaggttttgatatggagtttttttgtcattgggttttattttgctccgagcggtgtgaatagcgcaaagactgagttcttgtggggtattgtagtcatttggccggagtgaaaccagtgcgggaagtctgagttaacctgcagtgttaaggaaaaatccggtacactgacgtcagaaaaaatgcccaaaatggtgggcgtaacctcaattttttgaagcgtagccgaaatgaaaaaatctcaacaaagttacgatgttgtcgtggtagggggcggaatggtcggtgcagcagcggcattagggctggcgcaacgcggctggtcggtggcgctactggagcatgaagcaccgccggtatttgatagccaaagcgcgccggatctgcggatttccgccattggctgtacctcggtaggcttgctaaagcagctgggggcctggcaacgagtgcaggaaatgcgttatgccccttatcgtcgcctggaaacttgggaaatgcccggctctaaagtggtattcgatgcggcatctttgtcactgcccgaactgggttttatggtggaaaatcgggttttacagttggcgctgtggcaacagatcgatgagtgcacaaatttaacgctactgtgcccgtcacgcttacaaagcatggtaagagtggaacaacattggcagctcacgttagacacacaggagcagctacaggcgcgtttggtggtaggtgccgatggggcgaattctctggttcgccgtttagccggtattggcaccagcggctggcaatatcgtcagtcttgtatgttgattaccgtagataccggcgcgccggcgcaggatgtaacctggcagcaattttttccttccgggccgcgagcgtttttgccgttgtttgataattgggcttcgctggtgtggtacgacagtccgcaacgcatccgccagttgcaaagtctgcctctggcacagttgaatcaggaaattgcagccgcatttcctgagcgtctggggcgagtgaatgcgattgccgccggttccttcccgttaacccgtcgtcatgcgcaacgctatgtgcaatcaggattagtgttgttgggggatgcggctcataccatcaacccgctggccgggcagggggttaatttgggctatcgcgacgtggatgcattgctggatgtgatgaatgaggcgcgagagttggccgagccttgggatagcgaaaccgtattgctgcgttatcaacgtaaacggcgtaccgacaatctgatgatgcaaagcggaatggatttattctacaccgcgttcagcaatgatttaccgccggtgaaaatggtccgtaatctggcattgattgccgcccagcgagcaggaaaattaaaagaacatgcgttgaaatacgccctgggattataacaatctctttccgagcggcttatcaacaacagataggccgctgaaccctcgaatatttcccgctggtttctctaacttgttcgttctgcgaaccatccagtttggataatttatcaaaaacagaaaagcaaaaagcccgccgaagcgagcttttctaaatatggctggggtaccaggattcgaacctgggatgctggaatcagaatccagtgccttaccgcttggcgataccccaaaagatggtggctacgacgggaatcgaacctgtgaccccagcattatgagtgctgtgctctaaccagctgagctacgtagccatctttaaatcttttaaaacaagaaattgtatggctgggataccaggattcgaacctgggaatgccaggatcaaaacctggtgccttaccgcttggcgatatcccaactgatatacaattctttttaatcacaacttaagtttgacagtattccatttcagagaaatggctgggataccaggattcgaacctgggaatgccaggatcaaaacctggtgccttaccgcttggcgatatcccatctactgtgacaaccgatgaaaatggtgcgggaggcgagacttgaactcgcacaccttgcggcgctagaacctaaatctagtgcgtctaccaatttcgccactcccgcatacatgaaaaaagatggtggctacgacgggaatcgaacctgtgaccccagcattatgagtgctgtgctctaaccagctgagctacgtagccatcttttttctgcacaaccttcatcggcgttgcggggcgcattatgcgtatatggccgatttgcgtcaactagttttttccctaaaaagcgctgaaagggttcgtttgtttggcttgtgaacagtctggcgataaattaggcaattatagagattcattgttgaattttacgacaaaataaaaggttaaaagcggcaggtctattgacttgcgggggaattaagtaagcgaattttcggtgaaagaaacaggacgacccaaaggccgccctgttgaacgctattgacgaggttcgctgcgctgaatgaggcaacagaaaccgcaaactatgacttatatgcatcctgatgcacgcctacggcacggccggatgggtcatccatatttttaaaggattcatcccactcaatggcttttgctgatgaacaggccactgatggtccgcccggcacgcattccgctgcgcttggcagtgggaataactcttcaaagatcacgcgatacaaataagcttctttcgaatttggcgtgttgtaagggaaacggaaatgagcggtttccagttgttgatcggtaacttgctctgccgccattgcttttaacgagtcgatccagctatagccgactccgtcggagaattgctctttctgacgccaggccacgctgtgaggcagatccgcagagaaacattcgcgcagaatatgtttctccatttttccatttccgcacattttatcctgcggattaatacgcatcgccacgtcgaggaagtttttatccaggaagggcacgcgagcttctacgccccaggcggacatagctttgttggcgcgagcgcagtcatacatatgcagagccagcaatttacgtacggtttcttcgtgcaactctttggcatttggcgctttatggaaatagagatagccgccgaagacctcatcggaaccctcgccggatagaaccatcttaatgcccattgctttgattttacgtgacatcaaatacattggcgttgaggcgcgaatggtcgttacgtcataggtttcaatgtgataaatcacatcgcgaatcgcatccagcccttcctgcacggtgaaatgaatttcgtgatgcacggtgcctaaatggttcgctacttcctgcgcggctttcagatccggcgatcccaccagaccgacggcgaaggaatgcagctgcggccaccaggcttcgctacgctcatcgtcttctacccgacgggcggcaaatttcttggtaattgccgaaattactgaggaatccagcccaccagaaagcagaacgccgtaaggcacatctgacatcaggtgagttttcaccgcttcttccagcgcgttggccaactgatttttatcggtaacgttgtcttttacattttcgtaatcgaaccagtcacggtggtaatactcgcgaatttctccgtcctgactccataaatagctaccggcagggaattctttaatcgtgcggcataccggaaccagcgctttcatttcagaagccacgaacatattgccgtgctcatcatggcccatatacagcggaataatccccatatgatcgcggccaatcaggtacgcgtttttctcggcgtcatacaggataaaggcaaacattccttgcagatcgtcaaggaaatcagggcctttttcctgatacagcgccagaatgacttcgcagtctgaaccggtctgaaactcaaagtggtcgccatactgttgacgcaacgcctgatggttataaatctcgccgttaaccgccagcacatgagtacgcgcggtgttatacagcggctgagcacctgcgttaacgtccacaatagacaaacgctcatgggctaaaatagcgttatcaccggcataaatcccggaccaatccggcccgcggtggcgcatcaatcgcgacatttccaatgcagttttgcgtaattcgattggatcggtttttagatcgagcaccccgaaaatagaacacataattatctccctaacttctttagcctgtggcggtgatgatgttgatgttgtgtttgtcgttacgcttgggtggaacgactccatccccttaatttttcacgctgcaatatgaaatttttcaggtatgtaacgacgagtaataagaaaaatatgcaaaaaacacgccaatatagaaggttgttgttttgtgaattttggcggtgtggaaaatatgcattacaagaaaatgcgccaaaagggggagttaatgcaagaactttggtgcaacgcaccaaaaaagggaatccctggcatttttcacgccgcagcggcgttggcgctttcgcccccctaatcacttagttggctaatggattcatttcattgccgccttgttgcaacacgaaatccatgggggagtggatgaatttgaactgttgataaagctaatgattagggcgaatgtggtgatgggatcgtagtggcgtgagccaccggagcccccttgttgcggtaggcccgggtaactcgaacggttacattgttcagatcaccgtggcattgagtgctttcttcaacccgtccttgaactggagtgagcgttcaggaattgagagtgataggcgattaacggggctggtttctaggcaaaatatggcaatggactgtattgcaataacgaataaaagaagtggcggctgctttgccgccatcatctttaggaatgcttagataatatctatatcttctactgatggataaacgtagcttggacggaaaggcatagcctcaatgtcgtccagcgttgaaacaccggacaaaaccaaaatcgtttccaaaccggcctggaagccagccagaatatcggtacgcagattatcaccaataatcacggtattttccgaatgaccctgcatcttattcagcgcagcccggataatccacgggctaggcttgccgacgtaaaacggcttacggccagatattttctcaatcggcgcgcaaagagcgccgcaggccggtgcaaagccgcgcgcgtgggtatccggattggtcgcgataaaacgtgcgccgttggccacgaagaacgccgccttatgcatcatttcccagttgtaggagcgggtttcacccacaatcacaaagtcaggattgatatcggtgatggtaaatcctgctttatatagctcgtgaattaatgcgccttcgcccaccacataggcttttttaccttcctgacgtcgcagaaaatctgcagtagccattgccgaggtataaaacgcgctttccggcacttccagccctgcagccgcaaagcggttagccagatcctgagcggtttgcgaagggtagttagtgaggatcaccagcggcattccctcatgctgaattcgagccagaaaagcgtcagcaccgggaacggcggtgttgtcatgcaacaacacgccgtcgatatcacagataacgtttttaattgtcattgttttcattactcattagcacggcaaggtgccactataacatgcaggctaaaggaatgagcaggcagataaacggaaacttaatgccgttcagctgccgaaaaagtgaggaatcagttttcgagtaaacgctgtaatagaacgccgttcagcatggcgcgtttggccaaggcgaaagcgccgatagcagagccatggtctaactgggaagtcaccaccggcagatttttgcggaaatcttttagcacctgattgttgatgcagctttgaatcgccggtagcaacactttttcggcttcgattatctcgccggcaatcaccactttctgcggattaaacaggttgatcaccatagaaatggctttgccgaggtaacgacctacgtgctccagtacctcacaggccaacagatcaccgcgattgctcgccttacaaatggcgctgatattgcagtcttccagcgtaagtttgctcgcatagccttgagtcaataagtgacgcacccgattttcgatggcggcgttggacgccacggtttccagacagccaaaattaccgcagtagcagcgttcgcctaaaggatcgatttgaatatggccgatttcaccgacgtttccgttgctgccgaggaaaatctggctgttaacaataataccggcaccggttccgcgatgcagacgcaccaatacggagtcttcgcagtctttggttgcgccaaagtagtgttccgccaaggccaaactgcggatatcgtgaccgacaaaactgggcacgttgaaacgttcttgtaaattgtccaccaacggccagttatcaacactgatatgcggcatatagcgcaccacgcctgtatcaggatcgaccagacccggcagaatgaccgcaatagcaatcagttcacgcagcttgcgctgaaattgctcaataaactggctgatgatattaaacagcgcgtgttccagcgtttcttgggtacgttccggcagtgggtaatgttcttcaccgagagattttccgctcatatcatacaacgtgatagttgcgtcatggcggcctaaacggacggcaatagtatggaactggcggttttccgttacgatagaaattgcgcggcgaccgccggtggaggcttgctgatcgacttctttgatcagcccacgctccaacagctggcgagtaattttagtgacgctggcaggggcgagatggctgagatcggctatttgaatgcgcgatatcgggccttgctggtcaatgagccgataaaccacggcgccattgagttgcttcacaagatccacgttgccaatttgtgcctgtccgccggtgctcatcaataaatttactcgctttgtgtcaaacttcgttgccgttaacgatagttttggtgattttataatcgcgggtaaaggcagtcaggttggccactttgccgatttcaatgctccctaactgcttctccacgccgatagcgcgggccgcatacagtgttgccatgcgcagtgcttcatccagtggaatgcctacatgctcgacgctattttgcacagcttcaatcatcgttagcgcggagccactcagggttccgttttcatccacgcatagtccatcgcgatagtatattgttttgcccgcaaaaatgaactcttcaatgtcagcaccggctggcgctgtggcgtcggtcactagcaccaacttctcgcctttcagccgtttcgcgttgcgaatactggcccaggcaacgtgatgaccatcggcgatcacgccggtatacacttctggcgtgtcgaagatcgcacccatcagacccggttcgcggccagtgatatatggcatggcattatacaagtgggtcgcaaaactgatacccgcgccaaaaccgactcgcgcctgctgataagtggcattcgagtgaccggcagaaactataatgccagcgtctgccaactgacggatatatttggcttccaccatttctggcgccagcgtgaccttggtaatgacgtccgcattggcacacagataatcgatcattgccgcatcaggtttacgaataaatgctgggttatgcgttcccttttttaacgggcttaaataaggtccttccagatgcaggccgagagcctgattctgatgtttttccagataggcacgcatcacattgacggcgtgcttcatataatcgtcgctgcaggtaatcagcgttggcagatagctggtacagccggatttctcattggcacgctgcatgatttccagcgtctgttcggagatagcttcaagagaatcgttaaactgcacgccaccgcaaccattcaattgaacatcgataaaaccgggggctaggatggcgccacccagatcgcgctgttcgatatcggcaggcacttcagccagcggacaaatgcgttcaatcaaaccgtcagccacgactacagcgtgattatccagtatttcatggccggtataaatgcgaccgtgtgttaaagcatacatcggagccccctgagactattaaagatctttaacgttttctgcttctaattcagtgaagtattttacggtttttactttcaattccatagtagaagcttcgtcgcacaccatcacggctttggcatgcagttgcaggcagctaatggtccacatatggttgatattgccttctaccgccgcttgcaacgccagcgctttagcgtgacctgtcaccagaatcatcacttcttccgcgtccagcaaagttcccacaccgacggtcagtgcgtatttaggcacgaggcttgcatcgccaccgaagaagcgggaattcgcgatgcgagtttcctgcgtcagggttttgattcgggtgcgggaggccagtgaagaagccggttcgttaaacgcgatatgaccgtcgttacctacgccacccatgaacaggttaattttaccgtaggacttaattttctcttcgtaacgacgacattcttcatccacatcaggggcgttgccgttaagcaagttgatgttttcctgtgggatatccacatggtcaaagaaattctgatacatgaaggtgtgatagctttccggatgatcggttggcaaacctacgtattcatccatgttgaaagtcacgacatgcttgaaactaacttcaccagctttatgcattgcaatcaaatgcttgtacgcttccagcggagtgccgccggtaggcagacccagcacaaaaggacgctccgcggtcggtttgaacgcattgatgcggctaacgatatgtcgtgctgcccatttgccgacttctgcgggagttttcagtgggataagtctcatcatgcacctcatggtttagtcaaaaatgtctatactgtacgcggtttgaatcggtgatctaagggtaactcagattttgattcgcgctttggtacaatgctatgttgatttttcggatgataaaataagttttgtgtcgtggctagcagattggtgttttttgactggtttttggtgactgttatcacaaaaaaggaggttttaatttgcgatacgaaataatttttttacactccgcaatgagtaatacgtgccatgcgttttttctaaaaggtagtgaacaaaacaaataaactacttaaagggtccgatatcggacgaatagggggaaaggtgaatattcttagttacttgcaaaaagtggggcgggctttgatggtccctgtggccacactgcccgcagccgcgatactcatgggtgtgggttactggattgacccagtaggctgggggggggataacgcattagcggcgttatttatcaaatccggttctgcgatcatcgataacatgtctgtgctgttcgccattggtgtggcttacggtatgtctaaagacaaagacggtgctgctgcgctgaccggttttgtcggcttcctggttctgactactctgtgttccccggccgctgtgtcgatgattcaaaagattcctgtggatcaggttccggctgcgttcggtaaaatcaacaaccagttcgtgggtatcctggtgggtatcatctcggccgagttgtacaaccgctttagccatgtagagctgccaaaagcgctgtccttcttcagcggccgtcgtctggtgccaatcctgacttccttcctgatgattgccgttgcctttgttctgatgtatctctggccgttgatttacaacgcgttggtgactttcggtgaatacatcaaagatatgggctccgttggcgcaggtatctatgccttcttcaaccgtttactgattccggtcggtttgcatcacgccctgaactccgtgttctggtttgacgttgccggtattaacgatattcctaacttcctgggtggccaacagtctattgacgccggtaaagcggttgtaggtatcaccggtcgttatcaggcgggcttcttcccaatcatgatgttcggtttacctggcgcggcgttggcgatttatcactgcgcacgtccagaaaacaaagccaaagtggcgggtatcatgatggcgggtgcctttgccgccttcttcaccggtatcaccgaacctcttgaattctccttcatgtttgttgctccggtgctgtacttcattcacgccgtgctgaccggtatttccgtattcatcgctgccagcatgcattggatagctggcttcggtttcagcgccggtctggtggatatggtgctgtcttcacgtaacccgttggccactcattggtatatgctgattccgcagggcctggtgttcttcgccatctactatgtggtattccgtttcactatcaacaaattcaacctgctgaccccgggtcgtgaactggcgactgccggtgacgaaaccgacggctacgatgttgacgtggataatgctaatccaaataacgagagcgaaatcaacgcactggctcgccgttatgtgggtgccatcggtggttcagataacctgaccaacattgatgcctgtattactcgtctgcgtttgaacgtgaaagattctgcgttggttaacgatagtctggctaaacgcctgggcgcgtcgggtatcattcgcctgaataaacaaagcgtacaaatcatcgttggtactcgtgcagaactgatcgctggcgcaatgcgtaccgtactggccagtggccagattcctgcggccagcgcttcagctgcggcagaaattaagcctcaggcggtgatcaatacgcctaaagccccatctttggtgctggtggcaccggtaaccggtgacgtggttgcgttggagcaggttccagacgaagcctttgccagcaaagcagtcggtgatggcgtagccattcgcccaacggataaaaccgtggtttcgcctgctagcggcactattgttaagatctttaatactgaccatgctttctgtctagaaaccgacactggcgctgaaatcgttgtccacatgggcatagatacggtgaaactgaacggtcagggctttgctcgtctggtggaagagggggcagtggtagaagcgggtcaaccgattctggaactggatctggcctacctgaacgccaacgcgcgctctatgattagcccggtagttgttagtaatatcgatgattacgccggtattactctgctggctggcgacaccgtggtggcaggtcagaccaaactgtttgaaattcgcggtaaataaggcgttaacgcgctaattatctgttccgaatagcaaacatatcaacgggaagggagcgatctcttcccgtttttttatgccaaaacgccaatcccccctttttactgtaacaaacggttgtttccgggccgggcttgttggattataggcggttatgtgtttgcgctttgcattgaggaataaagcaatgagtgaggcagaagcccgcccaagtaattttatccgtcaaattatcgacgaagatttagccaccggtaagcatacatcggtacatactcgttttccgcctgagccaaatggttatctgcacattggccatgcgaagtctatttgcctgaactttggtattgcacaagattatcagggccagtgtaacctgcgctttgatgacaccaatccggtaaaagaagacgtcgaatttgttgagtcaatcaagcaagacgtggagtggctgggcttcgaatggagcggtaaaatccgctattcatccgattacttcgatcaactgcatcagtatgcgattgagctgattaacaaaggtctggcctatgttgatgagttgagcgcagagcagatgcgtgaatatcgtggcaccctgacaactccgggtaaaaacagcccgtatcgcgatcgcagcgtggaagaaaacctggcgctgtttgaaaaaatgcgtgccggtgaatttgccgaaggcgctgcctgcctgcgtgccaaaatcgatatggcttcgccatttatcgtgatgcgcgatccggtgctgtaccgcattaaatttgcggaacatcatcagtctggcaataagtggtgcatctacccgatgtatgactttacccactgcatttccgatgcgttggaagggattacccattcgctctgtactttggagttccaggataaccgccgtctgtacgattgggtgctggataacatttctatcgattgccatccacgtcagtacgagttctctcgtctgaatcttgagtacgccatcatgtctaagcgcaagctgaacctgttggtgaccgagaagctggtggaaggttgggatgacccacgtatgcctactatctccggcctgcgtcgtcgtggctatactgcagcgtctatccgcgagttctgccgtcgtatcggcgtaaccaagcaggataacaacgtcgaaatgatgtcgctggaatcctgtatccgtgatgatctgaatgaaaacgcaccgcgcgccatggccgtgctggacccaatcaaggtcattattgagaaccgcaaagcgggtgaagaatggctgacaatgccaaatcatccgaataagccggaaatgggaacccgccaagttccgttcgatagcgaaatttatatcgatcgcgctgatttccgcgaagaagccaataaacagtacaaacgtttggtattgggcaaagaagttcgcctgcgtaatgcctatgtgattaaagccgagcgcgttgaaaaagacgccgaaggtaatgtcactacggtttactgtagctatgacgcggaaaccctgaacaaagatccggccgatggccgtaaagtgaaaggcgttattcactgggtttcagttgctcatgcgttgcctgcggaaattcgtttgtacgatcgtttgtttagtgtaccaaaccccgcggcggcagaagacttcctgtcaacggtgaacccagagtctctggttatccgtcagggctttgttgagccaagcctggttgacgctaagccggaaaaaacctaccagttcgaacgcgaagggtatttctgcgctgatagccgttactctagcgccgagcatttggtatttaaccgtaccgttggcctgcgtgatacctgggctgctaaagcaactgcctgattaggctagtgattagtcatattgaaaagcgtagcttcggctgcgcttttttttgtctgttttctgtgttgtgctgaatattcgttactatgactcaaccactcaaccactcaaccactcaaccactcaaccactcaaccactcaaccactcaaccactcaaccactcaaccactcaaccactcaaccactcaaccactcaaccactcaaccactcaaccactcaaccactcaaccactcaaccactcaaccactcaaccactcaaccactcaaccactcaaccacttaaccacttaaccactcaacgacttaaccactcaacgacttagtcattcagccaaccatctgtcgctcgattattatgggccgcgttgcggtttaatttattaaacctgaacatcaggttgctccaattgataatgtcccattctttgcttttagggctgtaaagttaacgctcgagttaatactgaattttgagtggaataacggcatcaagaatattcgcattgcgaattaatggcgttgataaatgttcattagaacagatttttaatagtttgattcgtcgctgaaacctttcaatcatccctcgttgactttttatcgttgtattaattaggtttttaaccagaaattcagattttgtgaagtcagtaatattttttcatagttatgtgcacattgtcatattttggctaaataccttttttttcaattgataattcgcgtcgcgaaaaatagtctgtgtttagcaaataatgctaacgaggattatccctcactatttctttacccagatgggttttatttcagcggaacctgtgagcagtggtgaacacaaggcaacgctatttacttgtgatgtcaaagaggaattttttcatatggttacgcactgtgctaaacgtaaaacgttagcgctcgcagtcgcgggcgcggtgttagggactgggttcatgatagcgccggaggcgcaagctgaaggttttatcgatgattcatcacttactggtggtgtttactattggcagcgccaacgtgatcgtaaggacctaacgcctgacagtgcggactacggcaaatatgtcgccaacctgcatcactcgacttttaacgccaatctggatttctcttctggctacgccgctgacatgttcggtatcgacctggcggccttcggtgccgtagagatgaccaacagcggcccggcggcaccaaacgaaatcggcttcagtgatgcgaaaagccgttgggatgaaaaatggaccggtgacaccagcggtgtgagcctgtataaagccgccgcgaaattcaagtttggcgattactgggcgcagggcggttacattcaaccaaaaggtcaaagcttactggctccgcactggagctttatgccgggcacctaccgtggtgctgaaggtggcgcgaagtttgatttcgacaccgccggtgcgctctccatgtcttacatgtggaccgacgaatacaaagcgccttggtatcgcaatatgtacaacttccgtcaggctgatggcttgaccggcgtgagctacctacactccttcggtgctaaatacgacttcaaaaacaaactggttatggaagcggcgtttggtcaagcaaaagactacatggatcagtattttgctaaagcctcttatgccttcccggttgcaggtaacgatctgcgaacgtcttaccagttctacggggctaaagacaaagttgacggcggcgcaagcaaccctaacgacgtttacgacggtctggcatggttgcaggcgctgaccttcggttataccaccgggccatttgacctgcgtctggaaggtacctgggccaaggctgaaggcaatcagggctacttcctgcaacgtatgactccgggctatgccagctccaatggtcgtttggacgtgtggtgggattcccgctccgactttaacgccaacggcgaaaaagcagtatttgctggcgtaatgtatgacctggttaattggaatatggctggttggtctgtcggtacctcctatgcttacggctgggatgcaaaaccaagctctaatccagtgttcgatcagaatactcgtttaaaagagtctgcatggaacttcgacgtgctgtacaccttgcaggaaggccgagccaaagggacattattcaaactgcattacaccatgtatgacaaccacaccaatatcccgagctacggcggtggttttggcaacatcttccaggatgagaaagacattaaatttatcgtgatcgcgccgttcaccatcttctaactgtcggccccggcggagtcgtcggggcgcataacggagtctgtgtcatgaaaaaactgataggtgtggttgccgttgttctgggattgagcgcctgtgttcagcaagcgccggtacagccggaagattcgaaactgaaacaagcttacagtgcttgtatcaatgccagtgaagggtcgccagaaaggctgattccttgcaaagcggtgttaaacgtattgaagcaggaaaaagcccaccagacctttgctgagaaagaaaacgttcgcgtattggattaccaacgttgtctggatgccgaacagacgggcaacggtcaggcttatgccgctcagtgcggaaagctgtggcaggaaatacgtaacaataattaaggatggatgaggtgagtcatgaataaattcaaactaagtgctttggctgcgttaacagcaacttttggtttgatgggggcggcgcaagccagccccgccgaccaacaggttgtcgaccaactaagccagcttaaggttaatttcaaaataaaagataaccgagccgcagataatggaacggattgtgccgcgttgggagctgactgggcctcttgtaacaaaacactgattactctgaccaacgccggggatgagattcagggtaaagattgggcgctgtatttccataatgtgcgtcaggtgctggcggtgggtaacgatcagttcaaaattacccatttgaccggcgatctgcataaaatcgagccaaccgataagttcagcggttttccggccaataaagcagtggaaatcccgatcacaggtgaatactggcagctattcgaaaccgactttatgccgcgctggtacgccacttctggcgatgtgcagccaaaagttctggctagtactgacaccgaagatatcgatcaattcctgacgcgcttcactggggatcaatggaagcgtaccaaggacgataataacgttctgatgacgcctgaatcccgttttgttaagaacgaaagtctgaaaaccctgccggcagaaagcctgcgtgggcagattattccaacgccgatgagcgtcaaagttcataacgctgatgtcgatctgagcaaaggcgtggcgctggagttgagtgctttaccaaaacctgcggcagacgcagcgcagaaacgctttgaaatgctgggtgtgaatgttaatgcggcgggctacccgataacgactatgattcagccgagtgattttaaaggcgatctggccgttgctggtgcttatgaactgaagattggcgagcagggcgcgcaggtaattggtttcgatcaaaccggcgtgttttacggtttacagtcaatcctgtcgctgattccgtccgatggcagtaagaaaattgctactctggatgccaaagatgcaccgcgctttgaatatcgcgcgctgttccttgatgtcggccgtaactttaaaaccaaggatgcggtactgcgtttgttggaccaaatgtccgcttacaagctaaacaaattccacttccatcttagcgatgatgaaggctggcgcatagaaattccgggcttaccggagctgaccgaagtgggaagcaagcgttgccacgatctcagcgaaaatgcctgtttattgccacagttaggttcaggcccggatagcaataatctgggaagcgggcactttagccgtcaggattacatcgatatcctgaaatatgccaaagcgcgccagattgaagtgattcccgaaatcgatatgccggctcacgcccgtgctgcggtcgtttcgatggaagctcgctataacaatctgatgaagcagggtaaagaagcagaagccaatgaattccgcctgctggacccgacggatgattccaatacgacttcagttcagttctatgagcgtaaaagctacctgaatccctgcctggattcttccaaacgctttgtggataaagtgattggcgaaatggctcagatgcataaagaagcgggtatgccgctgcaaacctggcactttggcggagatgaggcgaaaaatatccgtttgggcgcgggtttccaggataaaaacggcaagattgagccgggcaagggcattatcgatcagagcatcgaagataaaccttgggcgaagtctcaggtttgtcaggacatggttaagcaaggaaaaattgaggacgtggaacacctcgctagccactttgcgatagaagtgagcaagttggttaatgcgcacggtattgagaaaatgcaggcctggcaggatggtttgaaaaacgccaaagatgccaaagctttcgctaccaaacgcgtaggtgtgaacttctgggataccctgtattggggcggagccgattcggtgaacgattgggcgaataaaggctatgaagtcatcgcttctaacccagactatgtttacttcgatatgccttatgaagtgaacccgcgtgagcggggctattactgggcaactcgttttaccgatgaagctaaggtattcagttttgcgccaaataacatgccgcagaacgctgaaacttccgttgaccgcgatggtaaccatttcagcgccaagagtgataagccttggccgggtgttcacggtatttcaggtcagtcgtggaatgaaactgtacgtacggacgatcaaatggaatacatgatgttcccacgagcgctgccgttggcagaacgtgcttggcatcgcgcaccttgggagcaggattataaagcgggccgcgagtacaaaggtggagaaacccatcatgtggatactcaggcgttaagtgccgattggcagcgttttgccaatattatgggtcagcgcgagttggcaaaactggataaggccggtatctcgtatcgcctgccagtgccgggagcgcgtgttcagggcggcttattggaggctaacgttagcctgccggggctgaccatagaatactccgttgacggtggtcagcaatggcagaaatacgatatcaaaaaccagccgaaggtcagtggcgaagtgatgattcgttctgccagtccggacggtaagcgcaacagtcgtgctgaagtcgttagcgcaactttgtaattatccgtctagttgtagtatcggccctgagcaattggggccaaattaacctgttgttaaactgagtgttattaagctgtgtctagttatctcctgtttaagttgagttgatggtaatttccccggtgcccccggggtttttttttgcctgttatttagtgtaattatttgcgaacgtttttagtcgctgagccttattttagataaagatgacttaggcccaaaataattgaaatttaatctgtttatttgaacgctaaataacaataggcggagaaggaaaatagatttatgaggagtaaaaaaaagaccacgcattttccaagtgtattttacgacttagagaagggtggtctgatactcggatctgatgaatcagatcttattttttgtcgtgcaaagtctcatcttcacggcaatcgccgccttcacagtgaccgtataaatacaggctgtgattcgtcagcttgataccgtgctgagttgcgatttcacgttggcggacttcaatggattcatcgctgaactcgatcactttgccacaatccaggcaaatcaggtgatcgtgatgatgctgttgggtcagttcaaagacagacttgccaccttcgaaattatggcgggtgacaataccggcgtcgtcaaactggttaagtacgcggtaaaccgtggccagaccaatctcttcacccatatcgatcagctttttataaagatcttccgcactgacgtgatggcaatctggcttttgcagcacttccaaaatcttcaggcgcggaagcgttaccttaaggccagcgttctttaatgctctgttgttgtcagtcatgcggattcagtcctgttactttgttattcaaattgaggctgttcagcctatgacatcggtaggcacaaaaatataattgcgtctcattatagaaccggtagctcaaaatgaaaaccgtaggttattaacaaagatataattgcacactttgcaagattaatcatgcagcgtattgatgaacggggagaacagatagccctagtgtacagtgatggcgacggaacttacaaatttaaaactgtttagtttcgttaacgccttattatcatctatttttgtggggtttttgccgcacatttacgcaccagaatggagaaccatgccctgatcgcaaaccaggcaattcagggcatgttaggcagattaacccacgatatctgacagactcagttcttcgctgatttgttttacccaagcttcaacgcgttcgttggtcagctctggttgacggtcttcatcgatagccaagccgataaagtgatcgtcatccgccagaccttttgacgcttcgaaatggtagcctgcggttggccaatgaccgacaatggctgcgccacgcggttcgatgatgtcacgtactgtgcccatggcatcacagaaatattccgcatagtcttcctgatcgccacagccaaacagggcaaccagcttgccattgaaatcgatctcttccagcgttgggaagaaatcatcccaatcacactgtgcttcgccgtagtaccaggttgggatcccgatcagcaaaatatcgaattgctctaaatcttctttgctgcttttggcaatgtcgtgaacctctgcaacgtctttgcccagtagcttttggatcatcttggcaatgttttcggtattgcctgtgtcgctgccaaagaaaatgcctacagttgccatatgaaatttatacctttgaattcaattagttacgttagttgtggagcctgctgctccacaatataacacatttttcatcgtgcttgtggaaagcgcctttttgctgaggctgactcatctgattttattaacaggctgattgctaagccattgtttcaaaaaagagtcatcagggactacgcaggtgactaaatccttaatagaaataaggaattaagtcctcagactgactatttccaataggccgtcatcatgccagaaaacatctctctgcttatatcaagtttatgcgatataaaattttcatctaccgctcaaccttggcagacgattgccgataaccgaattgaaacccgcgggtttcgattgcggtgccaaggagggccttgtcaaatcgatttttgatgaggaaggagaagtcgttggctgtatggaacgtcctaaatcgcttttcggtcatcaaactccaccagaattttgtggcaacaatccgacaataaatagaaaaggaacgaacatgcagtttttgaaaaatatcaccatcagggcagcgttactttgggttctcggggcatttagcttgctctggggcggagtttcagcttacacattattatcactcaatgagttaactcaagcctcaaacgcgaatagcgttttggtcgataacatcagcttggtcaatcagggaaccgatcagtatttccgtatggtgacccgattgagtcgttcagtggattatcgtctggcagggaatagcgcagatgccgatcgtgagctgaaatcctccaatctggccttggatagcctgaaaaagaacttggcacagtttaaatctatcgatcatgcgcagctcagcccggtattggttgaggatgttatttctaactggaatgccctgattgcccaaggggtggaaccactgtatcaagcggctatggccggtgataatactgcttaccagctgttgtccaagcaaacggtaccagccttaagccgtcagtatggcgcgtcatccgaggcattcagtaaaactgcatcggcagaaatcggcgtggtgaaggagcaatttgctcatcttaccaaggtaagcagcgttacgctggtttcggcgctggtgattggtctgttgatattactggcgacggatcgctttttggtggcaaatctggtgcgtccgctcaatatgatgcgcgaccatttcaaagtgattgcctccggtcagctgggacaacccattgtcgattttgggcgcaactgtgtcggccagttattcccactattgcgggatgtgcagaccagtttggccaacaccgttagcgcaatccgcgacagcaccgacagtatttatcatggtgcatctgagatttctgcgggtaataccgatttgtcttcccgtaccgaacagcaggccgcggcattagaagaaaccgcagccagcatggagcagctcacggcgacggtgaaacacaacgcagataatgctcatcacgccagccaattggcggcgacggcatcatctacggcgaaaaagggtggctctctggtttctgacgtagtgcatactatggccgatatctctgccagttcgaagaaaatcgccgaaattaccacagtgattaacagtattgcttttcaaaccaatattctggctctgaatgcggcggttgaagcggccagagccggtgagcaagggcgcggctttgccgtggttgccagcgaagtgcgcaatttggcacagcgcagtgctcaggcggcgaaggaaatcgaagggttaatcaccgaatcggtcaatcgtgtcaccagcggctctgcgcaggttgaaagcgctggcaataccatggacgaaattgtgcgctctattactaacgttacggatctgatgggcgaaatcgcgtcggcttctgatgagcaaagtaaaggaatcagtcaggtcggtcaggccgtggccgaaatggatagcgtgacacaacaaaacgccgcgttggtgcaggaagcatcacgggctgccgcttcactggaagatcaggctgctaagttgaatcaagcggtggcggtatttaaattgaaggatgacaaggtaacaccggcggctaaaaccagggtaaacccggtgaaagcgccgacgacccagcgcgtggacaataacgcgaattgggaaaccttttaactaaccagtgccataacattgaaagagtaaatatggagtggcgtaatgaaacacgccactccagcgtagtcaccgacggcattatagccctgcctgatccttagccaactgggcaagcagcatttgctcaatcagttcgctacggctgatgttacgttgctctgcaaggctattgagagcatcgaccgcatctgcattaatcttcagttccacgcgccgtaagccacgtactttatcgcgccgtagttgatttcgcttattaattctaagctgttcatcacgggataatgggtttgttttcgggcgccccggacggcgttcatctgcgaacagatccagcgtcgtgcgatccgtttgttcttttgccataggtagcggtactacaagggattcacatcagaaagcgttttagcttttccagatgatttggttaacacgtttcagaccaaaataaccgggctgaatttgcatttgtcccccggcacggcctgagtattacggctgaacgcggcggcaaaattatagcgcgccataataccctagccaatgaagtgccgacaatgactaactgcaattagatcaggctaattcgttattttttgcacaatttttccacaggaaatacatttcttttccccagggtacaaattttaaacaacagtattagcctcgcactttattccgcgtcgagaaaacggtggatagcacgtaataccgcctggggtttttccgcatggacccaatgcccgcagccggaaataacatgagcgcgagcctgcgggaactgacgggcaatttcatctcggtaactgtcctgaatataaggcgacaattcgccacgaataaacagaataggatgcgaccaaggcggaacaggctgccagccgacaatattttcatattgattccacagcgcctgtacgtcaaaacgccattctccagcctgaaatgatttcagcaggaattgaatcacaccttcttcttttatgatttcccgcatgatttttgccgcatcctgacgttgggtcacgccggcttcggtcacggcgttgagcgcagcgaaaatctgatcgtggcgtcgggtttgataatcgatcggtgcaatatcaatggcgaccagtttatcaatgcgatccggcgcaagagccgttagcgccattgccacttttccgcccatggaatggccgataataatggctttttctatggttaaatgatcgagtaattccagaacgtcctgcgccatcgccgggtagttcatttgcggggaacgaggagataaaccgtgatcccgcagatcgatttgcactacggtatgggtctgttgcaggtcgcgagccagcacgccgaggttatcaaggttgccaaacaagccgtggatcagcaggatagggagattattagtcggagaatgtgcgctttgtaagcgaaagttcaatttcatggcgaagttcatacagagagatattgtggttagggtatcatgactggatgatggtgtgctgctccggaatgacgcggattatcagaacaaagttgaataacgatctattcaggcttttcatcgccagatccgttatggcgctattcgccagccagctttgactttataatccttggatatgaataaagaaagtagaaaaacagtactggataaagatgaaaactattgaagtcgacgaagagctttatcgttatattgccagccatacgcagcatatcggcgagagtgcgtccgatattttacggcgcatgttgaaatttaccgctgggcaaccggtacgtactgttcctgcgggcgaagtcgccaagacgccggtggcggtagtgcctggtccgcgagatcgcgtgcgcgcgctgcgagaactgctgctttccgatgaatatgccgagcaaaacaaagcggttaaccgttttatgctggtgttatctacactttataccttggatgcagcggaatttgcggcggcaacggagtcactgcacggccggacccgcacctattttgccggtgatcaacaaacgctgctgcaaaatggcactcataccaagccaaaacacgttcctggaacgccatattgggtgattaccaataccaataccgagcgtaagcgcagcatggttcagcatattatgctggcgatgcagttcccgccggatttgaccgaaaaagtgtgtgggactatctaattcacatctattgcctctttccgttggctacaggctgcgcggaaggagttttttagctaattaggagtagtgacagtggcttatcatcctcgtgccgggcaacctacccgccaaagcgatttgattaacgttgctcaactgacgtcgcaatattatgtgctgcgcccagatgctgaaaatccggctcacggggtaaaatttggtacctctgggcaccgtggcagttctttgcgtcacagtttcaacgaagaccatattctggctattgctcaggcgattgccgaagtgcgccatcaacacggcattaccggcccgtgctacgtaggtaaagatacccacgcactgtcagaaccggcaattatttcggtgttggaagtgctaaccgccaacggcgttgacgtggtggttcagacagacaatggctttacgccgactccggctatttcccacgccattttgacctataaccgtcagaataaaacgctggcagacggcattgtcattacgccttctcataatccgccggaagacggtggtattaaatacaatccgcctaacggtgggcctgcggataccaatctgacttcggtgattgaaaagcgtgccaaccagttactggccgaaaagctggctggagtgaagcgtcaatcgttggataaagcctggcgtggcaatcgtctgcgtcagcaggatttgattcagccttacgtcgaaggtttggttgacgtggttgatatgccagctattcagcgtgccggtttgaaactgggcgtcgatccgctaggcggttcaggtattgcttactggcagcgaattggcgagcactacaagctggatttaacgctggttaatgattctatcgatcagactttccgctttatgcatttggatcacgatggcgtaattcgcatggattgttcgtcagagtgcgctatggcaggcttgctggcgctgcgcgacaagttcgatttagcctttgccaacgacccggattacgaccgtcacgggattgtcactccgtcaggtttgatgaatccgaaccattatctggcggtggccattaactacctgttccagcatcgtccgcgctggggggcagaggtcgcggtaggtaaaacgctggtttccagcgcgatgattgaccgcgtagtggctgatttaggccgcaaactggtggaagtgccggtgggctttaaatggttcgtcgaaggtttgcataacggtagctttggtttcggtggcgaagaaagcgccggtgcctctttcctgcgtttcgatggcacgccgtggtctacggacaaagacggtattatcatgtgtctgcttgctgctgaaattaccgccgtgaccggtgagaacccgcagcaccattataacgatctggctaaacgtttcggcgcgccaagttacaatcgcattcaggcaccggcgactcaggcagaaaaaaatgctttatccaaactgtcgccggaaatggtcacggccagcacgctggcgggtgatccaatcaccgcacgtctgaccgcagcgccgggcaatggggcgtctatcggtggcctgaaagtgatgaccgacaacggctggtttgccgctcgtccatctggcaccgaagaagcttacaaaatctattgtgaaagtttcctgggcgcagagcatcgcgaaaaaattgagaaagaagccgttgatattgtgagtgaagtattggctggcgcgaagaaatagcttttaagtttctcgcaaactcatgaaataacatggcagctccgcaagggactgcctttttttcgcgattagcccaaggcaaccagcagcgcgcctatgctaatcagggcaacgccaataccggcgataaacgaaatcttctcgccaaataaaatcacagccaaaatcaccgcaaacactacgctgagtttatcaatgggcgcaacctgcgaaacggtgccgtttttgatagccataaagtaaaacaaccaggacagcgccccggccacgccgcttagtacgataaacagcaaggcttttttatcggtgagtacggtacccaccagatgatatttcccctgaaccaccactacgccgactaaaaacagcgccatcaccacggccctcacggcggtggcggtattggcatccagatgttgaagaccgattttgccaaatatggcgaccagcgaagcggtaaaggcagagagtaaagcgtagattaaccaggtactcatagcgaataagacctatttgcaacgaaaactccgatgctacgcctgcaaactttccttgcctacccttaaaggtaaatcttagcgcggtaatgtatcagcaataaaacgatagccgacgccagtttcggtaatcagatgtttagggcgtgcgggatcggcctccagcttttgccgtaggtgacccatataaattcgcagatagtgattgtgctcgacgtagtttggtccccacacctgattcagcagttggcgctgggtgatgacttttccagggttggccagcagggcggttagcaggcgaaattccaacggcgttaggtggaggtcttcatcgccgcgtttgacctgacggttgatcagatcaacgctcacatcggcaaaactgacgatggggctttcctgcgctccagatccgtgacgacgtagtgccactcggactctggccagtaattcgctgataccaaaaggtttgctcagataatcgtctgcgccggcatccagcgcggccactttgtcttcttcgctattccgggcggagagcacaatcactgggatagcgctccattggcgcaaatcctgaatataatccagaccgtcgccgtccggtaacccgagatcgaggatgattaaatccggtttgcgggtgccagcctcgatcaaacctcgctgtagggtgtcgctgtcaaatacccggcagccttcgttctccaacgcggtacggacaaagcggcggatctctttttcatcttcaacaattaaaacggtagctggagagataatcacatgtcctcaggattaacgttatccatatctggtggaacctccaatggcaggacaaaatggaaaacagcaccgccgttttggcctttctctgcccagattctcccaccgtgaacatcaataatggcacggcaaatggctaaccccaagcccacgccgggaatggccgactctttattgccacgggagaatttatcaaaaataagctgctcttgcccaccggtaataccaggcccgttatcccagacttccacattcagccattcttcctgaactttggcgcgaatgcctagggttgcgctcggtccggcatatttatgagcattttccaataggttgataaagacccgctccagcagactgccatcacaattaatcagtaccatttcactgggtaaatccagctcgataagatgagaactgagcgttgtttccagcatgtgcagcgcgctgccgacgatttcttccaacgattgccattctttccgcaggttaaaaccgccggattgaatccgcgccatatccagcaaattattaaccaatcgagtggtgctaagcacctgttgacgaatctggctggcctgcggcgcgtggcgggaaccttcagccgctaagtccaaggtcaggatttcggcctgcccgaataatacggttaacggagtgcgtaaatcgtgggaaagcgccgccagcagggaatttcgcagttgttcgcgctctgcgtccagtttggcgacttcggcggtacgggccagatgcagacgctccagcgcgttggctatcaggctggtaaaggtttgtagcaaacgctgctgctctggcaccatcaattgccgtaggttggccggttcaatcgccagcacgccgaaggtttgttttgaggtggtcagtggcaacagttgataaggtacgccgggcagggtatcggtacctgcgcctgcgggagcaccgtgatcgaaactccagcgggcaatggcttcatccaccgaaaaaatattgccgtcttcggtgccaatttggtgtaatcgcccgtcttcctgcggcagcaacaggccagttttggcctgaaaactgctggaaagaaagtggcggctggttttggcaatgtcaacgcagcttaatgcgcggctcaggccgcgggacatctcatacaaatgtctggctcgttgctcgcgataacgggcgatgcgcgcctgatagcgtacgccggcggttagattccccacgacgatgccgacaatcaacatcacgccaaaagtgaccagatattgcacatcagtcaccgccagcgaccagtggggttggacaaagaacagatcgaaactggcgacgtttagtacggcagccagcacagacggccagcgcccgtaaaacagcgcaatgatcaccacgccgagcagataaaccatcaccagattcgcctgatcaaatccggggatcagccactgagataaaatagtgatcagtgcacacagcccgatcgcggccgcgcagccttgtagctgcatgcgccatttttcgctaaaactgcgtgtatcattttctttggccgccgcaggttgatggtcattttccaatgcgacaatcaccaaatccagatccggccccagcttgcccagtcgatcgccaaaactgccgcgcagtttccagcgttgctcgctgcggcgaccaataatgattttccccagattgtgatcgcgagcgtaacgtagaatcgcccgttcttcacaaggatcggaaagggtagcggtttccgcgcctaattcttgcgccagcttcaaggcgcgtaggatggctcggcgtttcgcttccggcaatgcgtggagacgtggcgtctctacgtagaccgcgtgccagatacagccgagacgagccgccaaacgcgctgcggtgcgcaccagcttctcattaccgacattgtggccgatacacagcaaaatcgcatcgcgggtgtgccaaacgcgctcgcggccttgggtatcccgaaaggcgcgcatttggtcgtccacccgatcggcggtacgacgtagcgccagctcgcgcagagcgatcagattacctttgcggaaaaaatgttcgatggcacgttcggcctgaccggaaatatacactttgccttcgttcaggcggcggcgtaggtcatccggtggcagatccaccagtacgacttccgtggcttcatcgaacatatgatcgggaatcgtttcccgcacgcgaataccggtcacgccgcctacgacgtcattcaggctttccagatgctgtacattgacggtagtcagcacatcaatgcctgaatccagcaattcttccacatcctgccagcgtttgggatggcgcgaaccgttggcgttactgtgcgccagttcatccatcagaatcagcgccggatgacgcgccagcgccgcatccagatcaaattcgcgtacctggcgattgcgatgagcaatacgcttgagcggtagctgatctaacccttccagcagcgcggcggtttcactgcgaccatgggtttctaccacgccaaccagcacatccagcccttgagcacgcaggcgctgcgcctcttgcagcatggcgtaggttttccctactccggcgcaggcaccaaagaagaccttgagcttgccgcgtggtttttcgttcgccactgccagcagactatcgggatctggacggattggttcggcatccacggtgatttttccttattgttttagcggtttaacgttatccagtgccatattcagtatcagcacgttcaccacgctttctccgaggaagttcggaaccgatttctgctcattttttgcgatgagatcctgcacttcggataatgttaactggcgggctttagccacgcgattagcctgataataggcggcttccagcgatatttgcggatcgagaccgctaccggaggcggtaaccaaatccaccggaaccgggccggtttgatctgggttagccaaacgcagtgctttaatccgttcgttaatctcggcatccagtgctgggttgctaatagctaaattactgccgccggatgacagagcattataaggtatatccgatgtggccgatgggcgaccactaaaatatcccggttgagtaaactgctgaccaatcagtgtcgaaccgaccgcttcgccgcccagcgttgccagagaaccatgggctttatcgctaaaaataacctgagccaaaccggtagtcagtaatggataggcgataccggtgatcagggttaataaaatcactaaaatcagtgacggacgcagataagacatcataaaaacctcgttattcacgcaggccggacgcagtgtccggcagccattaagcgctcgttcaacccatattcagcgcggttaacaccaaatcgatcagtttgatcccgacaaaaggcactaataaaccgcctaagccgtagatccataaatttcgacgcaacaaagccgcagcgctcatcgctttataactgacgccttttaacgccagtggaatcagaaacacaatcactaaggcgttgaaaattaccgccgatagaatggcggaagacggggagtgcaattgcatcacgtttaacgcattcaactgcgggtaagtggcagcgaaagcggccggaataatggcaaaatatttcgctacatcgttggcaatactaaaggtcgtcagggaaccgcgagtcatcagcatttgtttaccgatgtgtacaacctcaatcagtttggtcggattggagtctaaatccaccatattgcccgcttctttcgctgcctgcgtccctgagttcatcgccaccgcgacatcggcctgtgccagcgccggcgcgtcattggtaccgtcgccggtcatcgcgaccagacgaccttctccctgatattgacgaatcagcgccagcttggcttccggcgtggcttcggccagaaaatcatctaccccggcttcggcggcaatggctgcggcggtcagacggttatcgccggtaatcatcacggttttgatgcccattttgcgtaattcggcaaaacgctctttaatcccgcctttgacgatatctttcaacgcgacgacacccaaaacccgagcgccctctgcgacgaccaacggcgtgccgccggttttcgctacgctttcaaccaaatcgtccacggcgcgtgggaaatggccattattcgactccacgtggcgacgaatggcatctaccgcgcctttgcgaatcattctatcctgcacgtttacgccgctcatgcgggtttgggcagagaaggggacaaaggttgcattcaaggcatgaatatcacgctcccgcaaattaaagcgctgtttcgccagcacgacgatactgcggccttctggcgtttcatcggctaaagaagatagctgggcggcgtctgccaattgctgttcggtaacgccgggtgcaggcaggaattccgaagcctgacggttgcccaatgtgatggtgccggttttatccagcaacagcacatcgacatcgccagcggcttccaccgcgcgcccgctggtggctatcacgttggcacccagcatccggctcatgccggctaccccaatggctgataacaggccgccgatggtggttggaatcaaacacaccagcaacgctaccagaacggtaatggttaccggactgccagcctgattagcttccacactaaataatgagaagggaaacagcgtagccgttgccagcaaaaacacgatggttaaggccaccagtaaaatggtcaaagccacttcatttggtgttttacgccgttttgctccttccaccatcgctatcatgcgatcgaggaaagtctcgccgggattgacgctgcactcgactaccaaccaatcggacagcacgcgagtcccgccggtaacggaggagaaatcgccgccggattcgcgaataaccggagcagattcgccggtaatggcgctttcatccaccgatgcgccaccttccagcacttcgccatcgcaggggacggtatctccggcttgtactagcaccaaatcgccttttcgcaggctatcggcggatactttctcctgcggcgcatccgcgtgaggagcgctaagttttttagcccaactggttttttttacccctctcaggctttcggcctgagccttactgcggccttctgccagcgcttcggcaaagttggcaaacagcacggtaaaccaaagccaaagggctacgttaccggtaaacatggcgttgccgtcggcttgcccgctgagaatcgccagccagatagcggttgtcaaccaactgcctaggtacaccacgaacattaccgggttacgccattgggtacgcgggtccaattttttcactgcatcaatcagtgcggtgcgaaccagtgcgggctcaaagagtgcgcgttgtttgcgagtcatatgtgttctctctctacaaccgaatcgttgttaacattatttattaataatcagcgtgttaaccaaactttcagatgttcagcgaccggccctaatgccagtgcaggaataaaggtcagagcgccaaccaacatcacggtaccgaccaacagaccaacaaacagcggacctgaagttggtaacgtgccgttccccgccggttgacgttttttcgccgccagcgatcccgcgatagccagaaccggtaaaatgacgccaaagcggccgatgaacatcgccagcgccaataacaggttatagaacggggtattgacgctcaggccagcgaaggcgctgccattgttgttagccgccgatgacagggcgtacagcacttcactgaaaccatgagcgcccggattaagaattcctgctcgcccggcgtcggtgttcagtgccagcgcggtgcctagcagtaccacggtcggcgtgaccagaatggccagtgcggtcattttcatatcgaacacatcgatttttttacccagatattccggcgtgcggccaatcatcagcccggcgataaacaccgtcagcagcacaaacagcagcatcccgtataagccagagccaacgccgccgaacaccacttcgccaatttgcatcagccacatcggcaccatgccgcccagcgcggtaaaggagtcatgcatagcgttaaccgccccacacgacgcggctgtggttactacggcgtacatactggacgacagaatcccgaagcggctttctttaccttccatattgatattgctgtcagcgccgagcagggtaaggtgcgggttgcctgtcagttcggcgtacatcactacagcgacagcagtgatgaaaatcagtgacatagcccaaatcagcgcatgaccctggcggttatctcccactacctgaccaaaagcaaaacacagggcacagggaataaggaaaattgccagcatttgcacaaaattgctgaaagcggttgggttttcaaacggatgagcggagttggcgccaaagaaaccgccgccgttggtgccgagcattttaatcgcttcctgtgaagccactggccccatcggtaggatctgttttgctccctctagcgttgtaacgtgttggtaagcatcaaaattctgtaaaacgccttggctgacaaaaatcagcgcgataatcagagaaaggggcaatagcacgtatagagtaatgcgcagaatatcaacccaggcattacctagtgtgttggaagaatggcgggcgaaggcgcgaatcaacgcaaaagccacggtgatacccgttgcggcagacaggaagttttgcaccgtcaaaccggccatttggctgagataactgagcgtattctctccgctgtaggcctgccagttggtattcgtgacaaaactgacggtggtatttaacgctaactgccaggacatccccggtaaatgttgaggatttagaggcagagcgccctgagacattaataatgtgaataaaaatattccaccaatcagattaaagaataaaatagccagcgcgtattgccaggcattcatttcttcattttttacgccgctacagcgccagatagcggcttccatacgctgtaatcgcgggaatggttcgccttcgattagccgcgccaaaaaaccacccagcgggcgtgaaagaaccagtagcaccaataagaaactggcgataagcaggaaagctgacgcagccatttaaaagtcctccgcattaaataaggcgtataccaaatagcccagaagcaacaggaccagcaacgcaccaacaacgatgctgaaactcacgggacacctccacaggtgatgttttttgataacagcaggttacggagtcataaatatagttactgataaaaaatccgcattgtgtgtaaaaaaaacgtaaaaatggtcaaaaaaggttcataaagtgacgttaatttaggcggtgagtttgtggtagagatactttgagttcgaagaaaacaggaatgctaatttcatgctcataacgttatcaatctcgcaactaaaatagccacaagataactaaaggttagttttaaattaaccttaatgtaacaaaattacggaagatgacgataatttgtgtttttcgtgccttttagtggtcggatgagtggtaaactttcattcaatgcggtaaaattttgttcagtttccaaattcacttgtttatttctagcgccaagctgtaaaactgacccagagttgatagtggtctgcctaacagaacggcgcttttaaggaggatcgctatgtctatgtacaatgtatatccattgcatcaggttctcctgcgccgctgcgcagtaatcctgatgggtgttttggctttgccagtgatgttattccgccgtgaccgtgctcgtttttacagctatttgcaccgcgtttgggcgaaaaccagcgataaaccagtatggttagcgcagtctgaattagccgctcgggatttctactgagttaattagaatcccggtgtgaaatcgaatgccagtcagtgcacgctgactggcatttgtttttttggcttcccaataatacggttcacgagtgcccggcggcgctggctttactcacacactctcccctcatcaagccgatatttacctcgccttagggttatttcacgcaataacagttatgcttaaaattcataagattaaaaattctgatgccaatgtgtatcatcgggccagatagcgtgatttaaccaaacgtttcttgaatttattgaatgtcgggagtgaactatgagcgaaaaaatccccgtaggtatcagcgcctgcctgctcggcagcaaggtacgttttgacggtgggcataaacggctggacttcgctacagaagaactggctccctacgtcgaatttgaacccatttgcccagaaatggccattggtttgccttctccgcgtcccgctctacgcttggttcgcaagcaggatgacgtcctgatccgtaccagcaatgacgccaatcaggatgttaccgccgccatgcgtcgttttgccgaggaaaaggtatctcatctcagccatttgtgcggctatattttgtgcgcaaaatctcccagctgcggaatggagcgggtgagggtatacagcgagaaaggcgatttttccaagaaggagggtaccggaattttcgctcaggaattgctaaaacagttgccctggctaccggttgaggaagatggtcgcctgcacgatccgcaactgcgagagaattttgtcgagcgtatctacgcgctggctgagtttaattctctatggaagaaagggttaacgcgcggcagcctaatggcatttcatagtcgttataaactttcactgctcgcgcattctcagcctgaatatcgccagatcggtccttttgtcgccgcaatggatcaatgggaatcactggaagattttgctattgaatatcgtaaccgtttgatgcatttgctggcacataaagcgacccgccgtaatcacactaatgtcttaatgcatgtacaaggttacttccgtcgacatttaaatgctgctcaacggcaagagttggcccagttaatcgaccgctaccgacagggtatgcaacccttattagcgccaataactctgttaaaacattatatggctgagtacccggatgcctatctggcgcaacagcggtattttgaaccgtatccggaggcgttgaggttgcgctacggacattaagcggttggtgatcggctgctgtgtctgtctatttgatttttagataattttataaaaaggaatgccatgactacccatttggtctggtttcgccacgatttgcgcgttaccgataatttggccctgcacgcggcctgtgaagacccgcaggcgcaggtgcaggccgtatttatcgctacgccggggcagtgggcatctcacgatatggcgccgcggcaggccgcatttattcatcaaaacctacaattacttcgacagcaactcgcgctgcgtggtatcccattgcattaccatcaatgccatgatttcgacgcttcagtagactggttagccaatctttgtattgaacaacgcattgataaactgctttataatcatcaatatgaactgaacgaacgactgcgggatacgcagctggaagaaaagcttcgtgggcaagtcatctgtcagggtttccatgacagcctgttattgccgccgggaagcgttctgaccggcaacggcgaaatgtataaggtttacaccccatttcgccgtgcttttatccagcgcttgttgatgactgactgcaactgcgtgccagccccacaaccgcggcagtcgccaatggatgactcatctgcgctcgcaccttttaattatcctgcagcagaagtggacgctgagctctttcccgcgggagaagaggccgctttacgccgccttcgccaattttgtcgcgaaactgtgcaggattatcagaaacagcgagatttgccggcagttgacggaaccagccaattatcgccttatctggctcttggcgtgctgtctccgcgccaatgtttcaatcgactgcgagcagaatgccccaacgtgctggacatgccggacggtggcgcattcaattggcttaatgaattgatctggcgagaattttatcgccatctattggtggcttatccgcgattatgccgaaatcgtccgtttattgactggacggatgaggtacgatggaaccctgctgacgataagttgcaagcgtggcaacaaggcctgaccggctatccgattgtggatgcggcgatgcgacagctaaatgctaccgggtggatgcataatcgcttgcgtatgattaccgccagctttttggtcaaagacctgctgctggattggcgtttaggcgagcggtattttatgtctcagttgttggatggcgatctggctgccaataacgggggctggcaatgggccgcgtcaacggggacagattctgccccgtattttcgtattttcaaccccacgactcaaggggaacggtttgataaacaaggcacttttatccgccgttggctaccggagttagcggcggtgccggaaagtgatattcaccagccttggcgttgggcgcagtggcaacagccgcttgattacccgcagccgatcgtcgatcacaaacaagccagattggacacgttggccgcatttgaggccgccagacgggaacattcccgcacaacataacaacaaggagccagtatgtttaaaaaagggttagtcctgatcttcagcctctattcttcattgagctggggtggatttgaggtggttgcccttggcgtggatggtggcgtcagcgatggcaatttaacctcgtatttaattcgcagcgatactaaccctctgtatcttggtctggacgcaggatctgtgcttcccggtatagccaaaggcttggacaaagggaactttgccgatgtaaccgagcaaaacgcggcgcctttcacccgtcagggctatattttccgtcaacgcattaacagctactttattagtcacgctcatctggatcacgttgcagggctgattattggctctcccgaagacagtaagaaaaccatctatggcaccgccgctacggtggaaaccttgagaaaccactattttaactggcgcgtgtggccgaactttaccgattctggcagtggcacgcgcttgggcacttatcgcctgcaggctccgcgtcccgctcaacgtttcactataggtttaacccgattgatcggtgaaatctatcctctgagccatgaccagtctccttcttcgatgttattgatcggtcagggcgatgagttcttcgcctattttggtgataccgggcctgacgcggtggaaaaatcaaaaaatctggatcagatttggcgcattttgggtgaaaaggtcaaacagaagcagctaaaaggcatgattatcgaggtgtcttacccaaacagcgtggctgacggcaaactttatggtcatatgacacccaaatggttgctggcagagctgaaaaatctggcgaaatacagcggtgaaggcgagcaaccgctgaaagatttaccggtggtgattagccatatcaagccgtcgttacagcaggggccagatccccggaaagtcattgtggatgaactgcagcaggctaacgatctgggcgttaaatttattctgatggagcagggcgacagtcagcaattctgagtgtcgcgggtttgctttcgctaaaatcggcgggtatgttagccccaaaatcgctaaaacgagatgaagatcatgcgtaacaccgaactggaaaccctgataaataccgaattgaataccgctgcttttcaggattatgcgccgaatggcctacaggtcgaaggtcgccctgaggtgcaacgaattgttaccggcgtgacggccagtcaggcgttgctggatgcggcagtggagcatcgggccgacgcgattctggttcaccacggttatttttggaagaatgaaccggtggtagttcgcggtatgaaacgtaatcgcctgaaaaccttacttactgaagatatcaatctctatggataccatctgccgctggatgcgcatccaacgttgggcaataacgcgcagctagccaggctacttgatattcatgttatcggtgaaatcgagtcgttgttgccttatggcgagtttgaaaaaccgatcaataaccagatactgaaagagcgtctggaaaaacagctaggccgcccggttctgcactgtggcgatcacgcgcctacggatattcgtcgcattgcctggtgcacgggcggtgggcaaggttatattcagcaggcggctgatttcggggttgatgcctttgttaccggtgaggtttccgagcagacgattcatattgctcgtgagatgggggtgaatttttatgcggcgggtcaccacgcgaccgaacgcggcggcattaaggcgctgggggagtggctggcgaaccaacacgggtttgacgtgactttcattgatattcctaaccctgcttaatgctctctcaatcacgccgctcaatcaattggtggcgtgaattctctgctctaatcctgaccagaaaagcactattcctcgtaaaaactgagggttattagtttactcatcctaataaaaccctatctgacgaatattaagcgataaaggttatatttatcataacttttaggtattcaatgctgatttttaataagaaataaattagttaattgccaacatagtggtttaaaacacgttaaatattgctttcatagcgattaataatggtgttatccgcttatgtggcagttaatcgcctatctcccgttgttaagcccctattgacagttgcaatgcgctaaagcataactatgtgcttatggctaataattattaagttatagaaacagtcaaagtcttataaagagcagggagataaggattgcaacgagcacgatgttacctattgggagaaagcgcggtggttctggaattggagccgccggtgactctggcaagccaacaacgtatttggggtctggcggatcgcctgattcatcatcctgatgttcgcgaagccattccgggcatgaataacctgacgctgttgctggagaacccgcagcaaacggcgttggatgccattgagcgtttacagcgctggtgggaagaaagtgagtccttggtactcgaatcccgaaacattgatattccggtgatctacggcggagagttcgggccggatctggaagacgtggctcgtcacaccggtttgtcaccgcgtcaggtggtggaatgtcattcttctgcgagttatatcgtctatttcctcggttttcagccgggtttctcctatttaggcggtctgccggaacaactggcaacgccgcgtcgcggggagcctcgtctgtctgttgcaccgggttccgttgggatcggcggcagccaaacgggtatttatccgttagctacccccggtggttggcaattgatagggcgtacttctctggcattgtttaacccgttggaaatgccgcctaccttgcttcgccccggtgataatgtgcgctttgtaccactcaaggagggcgtatgttaaaaattattcgcgccggtatttacaccactattcaggatgaaggccgtcccggttttcgccgtttgggtatcagtcagggcggggcactggatttacccgcgctgaaaatggctaatatgttggtggggaatgcccccgctgccgcaggattggaaattacgctggggcagttttgtgccgaatttactcagacaggctggatcgcactaactggcgcgggctgtgatgccaggctcgacgaccaattactgtggaccggctggcgttatccggtgaaagcgggccagcgtattcaacttaatgtcccattgcggggaatgcgcagttatctggcgatctccggcggtattgacgtgcctgaaatgcttggctcgcgcagcactgatctgaaagccggatttggcggtcatcaagggcggttgattaaagagggcgacgaattgccgttgggcaaagcgagccgtttacctaaggaatccgttggcattaaacaattactgtttggtaatcgagtgcgggcggtgccggggccggaatatcacgagttttcgtccagtgcgcaagaggcgttttggcgcagtgcgtggcagctgagcccgcaaagtaatcggatgggctaccgtctgaccggcggcgagttatcccgcaataccgcgcgggaaatgttatcccacggtttactgcccggagtggtgcaggtgccgcataacggccagccaattgtattaatggcagatgcgcaaactacgggcggttatccgcgaattgcctgcgtgatcgaagccgatctcttccatttggcgcaaattcgtttgggagaaccggtgcattttgtcaaatgtacgctggaggacgctttgaaagccaaagccgaacaacagctgtatttgcaacagattgaacggggtttagccgcgggtttccacccggtggaggccaaatgaaagtagatttaaacgcagatttgggtgaaggctgcgccaacgatcgtgaattattgcagttagtcagttccgctaatatcgcctgcggtttccatgcgggagacgctgaaattatgcgccagtcggttcgttgggcgttggagtttcgcgtggctattggcgctcatcccagctttcccgatcgggagaactttggccgcaccgcgatgcaactgccgccagaaaccgtctatgcgcaggtgatttatcagctcggcgcgttggcggctatcgtgagggcggagggcgggcgtatgcagcacgtaaagccccacggcatgctgtataaccaggcggcgaaagatccgcagttggcagacgccattgctcaggcggtgaaagccgtcgattccaatttgcgtttggttggattggcgggtagcgaattaattcttgctgggcagcgcgcgggtttatctacccgacaggaagtttttgccgatcgtcgttatcaggccgatggttcgctggttccgcgcaacgagccggatgcgttgattgaaagcgatgaactggcattatctcaaacgctggaaatggtacagcagcggcgggttcagtcccgtgacggcatttgggtgccggtacaggcagataccgtttgtgttcacggtgatggcgcgcacgcattggcttttgctcgtcgcctctatgacagttttatacagaaaaatatcagcatcagtgcgagttgatagggcgtcaataatcataaccgcctagcccgggcggaataatagtgaacacttgatcagaacccaggataggagaatacatttggaacagaccgtaaatttctggccgcttattggtattgcggcaattatcatcggatttttaatgcgtattaatgccgtattggtggtgattaccgctggcattattaccggcgtagcggctttgatgcctattgccaccatattagagaaactgggtgaaggttttttgaatacacgaaacctgccgctgattttattactgccgctggcggtaataggtttattggagcgccacggcctgaaagaacgggcgcaggcgtggatttcaaaaataaaaagcgccacctccggtcggctgctgatcgtgtacctgtttgtgcgtgaagccacagcagcgctggggttaaccagtctgggcggacatccgcaaatggtccgtccattattggctccgatggccgaaggtgcggcggaaacacgttatggcgagttaccggagaaagttcgctaccgtttgcgcgctatgtcggcggccacggataacgtgggattattttttggggaagatatattcgtcgctttcggtgcgattatctttatgcataactttatgttggaatctggcggtattcaaaccgaaccgctgcatattgccctgtggggtattccgactgcgatttgtgcatttatcattcacgcatatcgcttgcagcgtttagataaacaattggcggcagaactgacggcgctgaatcagtcggcattagctgagaaaggggcgtcgaaatgattttccaacaacaatatctctattggctggcgggcgtagtgctgctgattgtcgccttgatgtcatttcgcgataaagctaacccgcgtcgaattaccaccggtttgttttggggattgtacggactgttttttctggtaggagactggacgtaccgtttggccaattcgctgggcggcgacggtccggatgaaaaacgcattctgaatatcaccgtgggcgtggtggtggtcattatggcgctgatcgccggttttggtggcgttcgattgggtagctatcatcagcgcacgccggtggaacgcgaagtgagcgctaagaaactggggaaccgcctgtttattccagcgctggcaattccagtcgtgacggttattggcgtactgttattcaacaacattccagcgttagatttgtgggtgtttggtagcggtaaccatgccactttggtgacgctgttctctatgactctaggctgtgtgctcggcctgattattgccgtggtgatgacgaaagaaaccgccgcgcagccggttcaggaagcgcggcgtttactggattccatcggttgggcctttattctgccgcagatattagccactttaggcctgttattcaccaccgcaggcgtgggaacggcgattgctcatttgacgcaagaatatctggctgtcgatcatcgctttatcgccgtagccgtctatgctatcggcatggcggtgctcaccatgattatggggaatgcgtttgcggcattccccattgtcaccgctgggatcgggatcccaattctggtatcacagcacggcggtaatccggcagttatggcggctatcgggatgttttccggctattgcggcacgctaatgacgccaatggcagctaactttaatatcgttccggcagcgttactggagttgcctgacaagaatgcggtgattaaggcgcagattccaaccggcgtaactttattgattgttaacgtattcttactgtatttcctgatgttcctgtaggagaagtgatgaaaaacgtattaattaccggttttgagccttttggcggcgagcgggtcaatccgtcgtgggaagtggtcaagcaattgaatgatttgcagctttccggcgttcgggtggtggctcatcagctgccctgcgcttttggcgaagccttaacatcgctgaatgcggccattgatgccactcagccggtattggttctggctattggacaggccggtggtcgtgcagatatcaccattgaacgcgtcgcgatcaatgtggatgatgcgcgtattgcggataatctgggacaacagccggtagaccagccgattgtgcctgatggcccggtggcgtactttacccgtttgcccatcaaagccatggtgcagggaatccgcgaggcgggaataccggcgtcggtttcccaaacggctggaacctacgtgtgtaaccatgtgatgtacggtctactgcatcgtttacatcaacaggacaacgaggtgaaagggggatttattcatatcccttatttgccggagcaggcggtaaaccaccccggttcgccaagtatgtcggctcagtccgtcctgatcgcgctggaagttgctatttctgtggcgttgcaaattgaacatgatttgcacatatccggcggcgcgacacactgatccctattggaataatcaataaaaaagcggagggcgacttccgctttgtcgttttaaggaggagcagaatgccggaaggcccggaaattcgtcgcgctgcggataaacttgccgaggcggtgataggcaagccgttgaaacaggtgtggtttgcttttcctcagctcaagccttatcaatctttgctgcttaatcagcaggtcaatgaaatacaaactcggggcaaagcattgttgacgcatttctccgatggattgacgctgtatagccataatcagctgtacggagtctggcgagtggttaaagcgggagaaacgccacagactaagcgagatctgcgaatacgactggaaacggccgaccaggccattttgctctacagcgcctctgatatagagattgggccgcgtgaagtgattgaacaacatccctttttgcagcgtattggcccagatgtgctggatatggcgctcacggaaaatgacgtgattgcgcggttattgtcgccgcagttttgccgtcggcaattgggcggaatgctattggatcaggcatttttggcgggattaggcaattatttacgcgcagaaattctgtggctggcggcgttggcaccaacgcataaaccgcaggatctccccccagaggcattgcaggcgttggcttcggcgttattggcggtgccacgcctttcctacgcgacgcgcggcgtagtggatgaaaatcatcatcacggcgcattattccgtttcaaggtcttcaatcgtaccggccagccttgcgcgcgctgcggtgagccgattgaaaaaattgctatttcttcgcgtcctttctattggtgtccggcctgtcagcattaattatcaatgataaaacgcgtttttcagccataaaaaacgccactgaaaagtggcgtttgatgatcgggtcgcgcctagattcagtgcgcgacgggagtcaatttacttcttgatttggctagtgaaatcgcgttctgcgtagccggtgtacagctggcgaggacgagcgattttcaggccttcatcatgcatttcgttccagtgagcaatccagcctatggtacgggcgatagcaaagatcacggtaaacatggaggaaggaatacccagcgctttcaggatgatacctgagtagaaatctacgttcgggtacagtttcttctcgatgaagtacgggtcattcagggcgatacgttccagctccatcgccacttccagcaggttgtcattcaggttgagttctttcaacacttcatggcaagtctcacgcatcacggtagcgcgtggatcgtggtttttatacacccgatgaccgaagcccatcagacggaaggagtcatttttgtctttggcgcgacggataaattcaggaatgtgctcaacggttttgatttcttccagcatcttcaggcaggcttcgttcgcgccaccgtgagccggtccccacagggacgcaatcccggcagcaatacaggcaaacgggttagcgccggaagaaccggcggtacgcacggtagatgtggaggcgttttgttcatggtcagcgtgcaggatgaagatgcgatccattgcgcgttccaataccggattcactttgtattcttcacatggagtagagaacatcatgtgcaggaagttaccggcgtaggacagatcgttacgtggataaacgaaaggctggcctagggaatatttgtaacacattgcggcaaccgttggcattttggacagcaaacggaaagcggtaatttcgcggtgacgctcgttgttaacatccagtgcatcgtggtagaaggcagccagtgcgcctgtcacgccgcaaagtacggccattggatgagagtcacggcggaagccttgcagcagtcgggtaatctgctcatggatcatggtgtgacgggtcacggtagttttaaacgtggcgtattcttccggcgttggcgtttcaccgtacagcaagatatagcacacttccagataggtagattctttcgctaactgatcgattgggaagccacggtgcagcaaaataccgttatcaccgtcgatgtaggtgatttttgattcgcaggacgcagtggaggtaaaaccgggatcaaaggtgaaatagcctttggaacctaaggttcgtacgtcgataacatcggtacccaaagtcggggatagtacgcccagttcaatcgtagcttcgccagtcaaagttagcgtcgctttcttgtcagccatttacagtctccttagcgctatattttaaaatccttaacaaccgtaatgtcttttgtgcctgcggcatgccttatcggttatcagcagcaccctgttttattcatcgttcaagtcgcgatttagggtacagagcatgttgctaatagaaccaacaatccggcacgttggagtgtcaggcgacgttacgtgattgttaacgatttgtcggatacttatatttttctaatcattgcctacgagattattaggggtatttacttacacactgttgcacaacttatgtccataaggaagtgtatccgtagacctttcgtgcatcatagggcttatttatcccttagttgtaatggaaatgtttattctttgtcaaatcagataattaattttatttaaattgtgtaaatcgtgatcctaatcactgttcaaggcaaatgttatcaatcagtttgtgtgggaattgtaataagaatgtgaaccccctatactgccgccaggtctccggattaccctgaagtaggagcacccagcgttatacagagcacacattttttgacactcaggacgtaatgtgaaatttgtgatgtgaagggttacgactcataacgctgtctgatccccgcccaggccggaggaaggaaaataataagagctgtgtgggcaaaaccgtgaaaaaacaaagacctgttaacttggatctgcaaaccatccgatttcctgttactgcgatagcgtccatcttacatcgagtctctggcgtcattaccttcgttgctgtgggtatcctcctctggctactgggtctgtctctctcgtcctacgagggattcctgcaggcctccgccatcatgaatagctttattgttaaattcatcttctggggaattctcactgcgctggcctatcacattgtcgtgggcatccgccacgtattaatggattttggctatctcgaagaaagtttagcggcgggtacccgttctgcccaagtggcgatgggcatcaccctggtgctgtcagttctggctggagtcctggtatggtaagcaatgcttctgcgttagggcgtaatggtgtacacgactggctgcttctgcgcgcgtctgcgatcgtcattaccctatatgtactctacatcctgggctttgttgccattgccccggacatcacctacgaaatctggcgtggcttcttcgcctcttccatcaccaaagtctttaccttgctgacgctgctgtcgattcttgctcacgcgtggatcgggctgtggcaggtattaacggactatataaagccattagcgttgcgtctggtcttacagctggtcgtggtgattacgttattggtttacttactgtacggaactattgtggtgtggggagcttaaatgaaactgccagtcagagagtttgacgctgttgttattggtgcaggtggcgcaggtatgcgcgcagccttgcagatttctcaaatggggttgtcttgcgccctgatttccaaagttttcccaacccgttctcatacggtatctgcgcagggcggtattaccgttgcgctgggtaacacccacgaagataactgggaatggcatatgtacgacacggtgaaaggctccgattatatcggtgaccaggacgccattgaatatatgtgtaaaaccggcccggaagcggtgctggaactcgaacacatggggctgccgttctctcgtctggaagatggctccatttatcagcgcccgtttggtggccaatcactgaacttcggcggcggtcaggcggcacgtaccgctgcggcggctgaccgtaccggccatgcgctgttgcacaccctttatcaacaaaacctgaaaaaccataccactatcttctccgagtggtatgcgctggatttggtgaagaatcaggatggcgcctttgtcggctgtaccgcaatctgtatcgaaaccggcgaagtggtttatttcaaagctcgcgcgacggtattggctaccggcggagcagggcgtatttaccagtccacaaccaatgctcacattaataccggcgacggcgtcggcatggctctgcgtgccggcgttccggtgcaggacatggaaatgtggcaattccaccctacgggcatcgcgggtgctggcgtactggtgaccgaaggctgtcgtggtgaaggcggttatctgctgaacaaacacggtgaacgctttatggaacgctatgcgccaaacgctaaagatttggccggtcgcgacgtagtagcccgttccatcatgatcgaaattcgtgaaggtcgtggctgtgacggtccttggggcccacacgccaagctgaaactggatcatttgggtaaagatgttctggagtcccgtctgccgggcattctggaattatcccgcacctttgctcacgttgatccggttaaagagccgattccggttattcctacctgccactatatgatgggcggtattccgaccaaagtgaccggtcaggcgattaccgtgaatgaaaaaggcgaagacgtcgtgattccgggtctgtttgccgtcggtgagattgcctgcgtatccgtccatggtgcaaaccgtctgggcggcaactcgctgctggatctggtggtatttggtcgagcagccggaatgcacttgcaggaatccttaatggagcaagggccaagccgtgatgccagcgattcggatattgaagcctcgttggatcgtatgaaccgttggaataacacgccaagcggtgaagatccggtggaaatccgtaaagccttacaatcttgtatgcagcataacttctcggtattccgtgaaggtgatgccatggcaaaagggttggaagaactgaaagtgattcgtgaacgcctgaaaaatgcgcgtctggacgacacttccagcgaatttaacacccagcgtatcgaatgtctggaactggaaaacttgatggaaacagcgttttccacagcggtgtccgcaaacttccgaaccgaaagtcgcggtgctcatagccgtttcgacttcccggagcgtgacgatgcgaactggctgtgccactcgttgtatctaccgcaaaccgagagcatgacccgccgtgaggtgaacatgcagccgaagctacgcgcggcgttcccgccgaaagtgcgttcttactaacgcgtttgccgagttaacccgttgcggaggagtgagtcatgaaactcgaattttcgatttatcgttataacccggacgttgatgatgcgccgcatatgcaggattacagcctggaagcggaagaaggccgggatatgatgctgctggatgcgctaattcagctgaaagaacaagatcctaccctgtctttccgtcgctcctgtcgtgagggcgtgtgcggctcagacggattgaacatgaacggtaaaaacggcctggcctgtattacgccggtttcggcgttaaccaatggtcgtaagaagattgttattcgcccgttgccgggtttgcctgtggtgcgtgatttagtggtcgatatgggccagttctacacccaatacgaaaaaattaagccttacctgcttaatgacggcaaaaacccaccggcgcgtgagcatctgcaatctccggaagagagggcaaaactggatggtctgtacgaatgtatcctgtgcgcctgctgctcaacctcttgcccgtcgttctggtggaacccggataagttcgttggacctgctggtttactcgctgcttatcgcttcctgatcgacagccgtgatactgaaacgcagtcgcgtttagacgaccttaacgatgctttcagtgtcttccgttgtcacagtattatgaattgtgtgagtgtttgcccaaaaggccttaatcctactcgcgcaataggccatattaagtctatgttgttgcaacgaagtgcatgatgtgagtttataaacccggggaataattttcccgggtgataataaaggtagggaatctctaaaagccgacgctgttgtctgtttctagaggttccttgaaagggaccgataaggtccatagcagaacgtgcattgagcacgtcgagtgaaccgtttttacggcaaaccgtttacttcacggtatatatgttaaccacggcgaaaactgaagcttcaaagcttaagggatcatgatgcagaacggcgcaatgaaggcctggctggattcctcctatctggcgggcgcgaaccagtcctacatagagcagctctatgaagattatttgacagatcctggttccgttgatgatagttggcgttcgatttttcaacaactaccttctacgggtgtaaaacctgatcaattccactctcaaacgcgtgagtacttccgtcgactagcgaaagataccacccgttataactccgcgatcaacgatcctgatactgatgccaagcaagttaaggtgttgcagttaatcaacgccttccgcttccgcggccatcagcatgctaatctcgatcccctcggtttatggaaacaggaagaggtgccagatctcgatcctgcttaccacaacctgactgaagcagacttccagaacaccttcaacgtgggttcttttgccatcggcaaggaaaccatgaagttggccgatctgtatgccgcactgaaacagacctattgcgggtctatcggtgccgagtacatgcatatcaccaacactgaagagaaacgctggattcagcaacgtatcgaatctgtcgtagggaaaccaacgttcagtgatgaagagaaacgtcgtttcctgagcgaactgaccgctgcggaagggttggagcgttatctgggagccaaattccctggtgccaaacgattctcgctggaaggcggcgattcgctggtgaccatgttgaaagagatgatccgtcacgcaggtaaaaacgggactcgcgaagtcgtactggggatggcgcaccgtggccgcctgaacgtcctgattaacgtgctgggtaaaaaaccggaagatttgttcgatgaatttgccggtaaacataaagaacatctgggtacgggtgacgttaaatatcaccagggtttctcctccgatgtagaaactgaaggcggcctggttcatctggcgctggcctttaacccgtctcatttggaaatcgttagcccggttgtcatcggttccgttcgcgcccgccgcgatcgtctggataaagctcgcagcaatatggttctgccaatcaccattcatggtgatgcggcgattaccggtcagggcgtggttcaggaaactctgaacatgtcgcaggctcgtggttatgaagttggcggcaccgttcgcatcgtcatcaacaaccagattggtttcactacttccaatccgcaagatgcccgttcgacgcagtactgtaccgatatcgcgaaaatggtgcaggcgccgattttccacgtcaatgctgatgatccggaagccgtggcgtttgtaacccgtctggcgttggatttccgtaacacctttaaacgtgacgtgatgatcgatctggtctgctatcgccgccacggccataacgaagccgatgagccaagcgcaactcagccagtgatgtatcagaagatcaaaaaacacccgacgccgcgcaaaatctatgctgacaagctgactgagcaaaaaattgccagcctggaagatgccacggaaatggtcaacctgtatcgcgatgcgttggatcacggagattgcgtggttgaagaatggcgtccgatgaacctgcaatccttcacttggtcaccgtatctgaaccacgagtgggatgaagaatatccgagcaaagttgagatgaaacgcctgcaagagctggcgcgtcgtatcagccaggcgccggacgctatcgaaatgcagtctcgcgtagcgaaaatctacggtgaccgcgctgaaatggccgcaggcaacaaaccgttcgattggggcgctgctgaaactctggcctacgccacgctggtagatgaaggtattccgattcgtctttccggtgaagatgcggggcgcggtaccttcttccaccgtcacgcagtgattcataaccagaaaaacggctcggtgtatgtgcctttggcaaatattcacagcggtcagggtgatttcaccgtttgggattccgttctatcagaagaagcggtactggccttcgaatacggttacgctaccgcagaaccgcgtaccctgactatctgggaagcgcagttcggtgactttgccaacggtgctcaggtggttatcgatcagttcatcagttccggcgagcagaaatggggccgtatgtgtggtctggttatgctgttgccgcatggttacgaaggtcagggtccggagcactcctccgcccgtctggaacgctatctgcaactgtgtgccgaacaaaatatgcaggtgtgcattccttctacgccagctcaggtttaccacatgctgcgccgtcaggctctgcgtgggatgcgccgtccgctggtcgtcatgtcaccgaaatccttactgcgccatccgttggctgtgtcttctctggatgaactggctaacggtactttcctgccggcaatcggtgaaatcgacgaattggatccgaaagcggtgaaacgcgtagtgatgtgctctggcaaggtctactacgatctgctggaacagcgtcgcaagaacgatcagaaagatgtcgctattgtacgtatcgagcagctttatccattcccgcatcaggcagttcaagcggttctggaacagtatgcccacgttcatgactttgtctggtgtcaggaagagcctctgaaccagggtgcctggtattgcagccaacataacttccgtgaagtgattccttttggttcctctttacgctatgccggccgtccggcctctgcctctccggcggtaggttatatgtctgtacaccagaaacaacagcaaagtttggttaatgacgcgttgaacgtcgaatagctaattgtttaaaacacaagggatagataatgagtagcgtagatattctggttcctgacctacctgaatccgtcgcggatgcgacagtggccacctggcataaaaaaccgggcgacagcgttcaacgtgacgaagtcctggtagaaatcgaaactgacaaagttgtgcttgaagttcccgccagcgaagcagggattctggactctattctggaagacgaaggcgcaaccgtgctttctcgccagattctgggtcgaatccgtccgggcgatagctcaggtaaaccgacagaagagaagatccagagcaaagaatccacccctgctcaacgtcaaaccgccagtttggaagaagagagcaatgacgccctcagcccggcgattcgccgcctgattgcagaacattctcttgatgccagcgctattaaaggcagcggtgtcggtggtcgtattacccgtgaagacgtggaacaacacctggcgaacaaaccggcagcgccgaaagccgccgaagccaaagtggaagttgccgcacctgcattgggcagccgcagtgaaaaacgtgtaccaatgacccgcttgcgtaaacgcgtggccgagcgtctgctggaagcgaaaaacagcactgccatgttgacgactttcaacgaaatcaacatgcagccgatcatggatctgcgcaagcagtacggtgaggctttcgaaaaacgtcacggtgtacgtttgggctttatgtccttctacatcaaagcggtagttgaagccctgaaacgttatccagaagtgaacgcttctatcgatggcgaagacgtggtttatcacaactacttcgacgttagcatcgctgtttctactccacgtggcctggttacaccggttctgcgtgatgtagacacactgggcatggctgatatcgagaagaaaatcaaagaactggctgttaaaggccgcgatggcaaactgaaagtggaagaactgaccggcggtaacttcactattaccaacggcggcgtgttcggctccttgatgtcgactccgatcattaacccaccacaaagcgcgatccttggtatgcatgccattaaagatcgtccaatggcggtaaatggtcaggtagtgatcttgccaatgatgtacctggcgctctcttacgatcaccgtttgatcgatggccgtgaatctgtcggctatttggttacggtgaaagagatgctggaagacccagcacgcctgttgctcgacgtataaaaaagataacggttaaaggctgcctgacggttggggaatatcccgatctgtcaggctcctgacgccataaatctagtgttaaaaaacctatgtgttaacaaaaacctatgtgctaattgcggtcgatcccagggtcggcattatccagacactgcggggctcgtcccgtctacagacttaaatggatagaacatcatgaatttacacgaatatcaggccaaacaactgtttgctcggtatggtctgccggctccaaccggttacgcctgtaccacaccccgtgaagcagaagaagccgcatcaaaaatcggcagcgcaccttgggtggtaaaatgtcaggttcatgctggcggtcgcggtaaagcgggcggcgtgaagctggttaatagcaaagaagaaattcgtgcttttgcggaacactggttaggcaagcagttggtcacttaccaaactgacgcccacggccagccggtacaccagattctggtagaagccgcgaccgatattgataaagaactgtatctgggcgctgtagtcgatcgcggttctcgtcgtgtgatcttcatggcttcaaccgaaggcggtgttgaaatcgagaaagttgcggaagaaacgccggaactgatccacaaaattgctctggatccactggcgggtccgcagccataccaaggccgtgagttagccttcaaactgggtctaaccggtaaacaagtcagccagttcaccaagatctttatgggtctggcagcgctgttcctggaacgcgatctggcgatggttgagatcaacccgctggtgatcaccaaacaaggtgatttggtgtgtctggatggcaaactgggtgcggacggtaatgccctgttccgtcaaccagagctgcgcgaaatgcgtgaccagactcaggaagacgcccgtgaagctcaggctgcgcagtgggaactgaactacgtcgcgctggatggcaacatcggctgcatggtcaacggcgcaggtctggcgatgggtactatggacatcgtgaaactgcacggcggcgaaccggctaacttcctcgacgttggcggcggcgcaaccaaagaacgcgtaaccgaagcctttaaaatcattctgtccgacgacaaagtgaaagcggtgctggtcaatatctttggcggtatcgtacgttgcgatctgattgctgacggcatcattggtgcggtagcagaagtgggtgttaacgtaccggttgttgttcgtctggaagggaataacgctgagttgggtgccaaaaagctggcagacagcggcttgaatattattgctgcgaccagcctgacagatgcggctcagcaagttgttgcggcagtggggagtaaataatgtctattttaatcaataaaaacaccaaagttatttgccagggtttcaccggcggccaagggactttccactccgaacaggcgattgcttacggcactaaaatggttggtggtgtaacgccaggcaaaggcggcactcagcatctgggtctgccggtatttaataccgtgcgtgaagccgtggaagcaaccggtgcgaccgcttcggttatctacgtgccggctccgttctgtaaagattccatcctggaggcgattgacgcaggcattcagctgattatctgtatcactgaaggtatcccgacgctggatatgctggttatcaaagtgaaactggaagaaagcggcgtgcgcatgatcggtcctaactgtccgggtgtgatcaccccgggtgaatgtaaaatcggcatcatgccaggccatattcatctgccaggcaaagtgggcatcgtttctcgttcgggtaccctgacttatgaagcggttaagcagacgactgatattggcttcggtcaatcaagctgcgtcggtattggtggcgatccgatcccaggctctaactttatcgatatcctgaaactgttccaggaagatccgcaaaccgaagtgattgtgatgatcggtgagatcggcgggaccgcggaagaagaagccgcagcctacatcaaagatcacgtcaccaaacctgttgtgggttatatcgccggtgtgactgcgcctaaaggcaaacgtatgggccatgctggcgccatcattgccggtggtaaaggtacggctgaagacaagtttgcggctctggaagcggcaggcgtgaaaacagttcgtagcctggccgatatcggtgacgcggtgaaagaagttttacctcagtaagctgacttaagtcattcgagcggcggcaagagggtagacaggtgaacccgatgagtttaggcgactaagtgatttgggcgatcgggttaagccaacgcagaggcagcttgaggcatacaggtctagatatagataaaaataacgattagctcgacatatattggccaccttccggtggccttttttttataaagaaaccgcgtgaaccttccgatatcgcagaattcccctccgttagagaggggagggcatcagaaattattcagggcggtaatcagtatcatatccgtttgtgcctgctgcttagcttgctcgcttttagcgttgccaagctgctgctgaagtgacgccagcgctgcgttatagctggctttatcgctaaacagcttatccttaacgttaatcgatgcgatattggtaaaacgtccgtcttcggtggtaggaaccgctattttcccttcattgattagctttttcaccacttctcgctgcggttcataaccttccaatccaaccagcttccaacgttgctcggtttttccttggtattgaccgtgtttgacctcggttagataacggatggtcagattacgaatggtgccgtcctcttcgccatattctgccttagtatcggaaagtaccgggaactgctgacccgccagtacaccacctttctgagtcaaatgtcccattcgatagctgttcattcctaagcgaattggcgtgctatcggtaacggcttcgccatggttaaaacgtaaattggtgatacgtgaacccgcaggttggcgtaggtcgatggtgtaggtgacgccatcaaagaaatcattggtggaatatttagacgcgcgacgttgcggattaaaactgtaggtgacatcgcccggtttaacctgattgaaataatcggctgaccactccatatattttttcagttctttacccgtaagctgataaaccgttatttccccgccggcgtattgatagttaaaagcaatatctttagcttttatctcacctaaatctaatttagctcggtcattatcgatctgtaaggcaataacttgcgctttaggcgcatagtggcgtgcggcttcctggaacagagcactgataccggtatcctgaatatgtacttgcggaatgccttttatctcatctttaggcactaagtctactccgcttagggtcgcaataacccgatttgcattggcgcgcaaaatactgtgataaggctgataaatagcttcaagttctttatcagaatgaattcctttgatggggtaggtataactgtctttattgattaaatgatattttccatcccgctgttcaaattgcaaatcgatacgggaaagggcgcggccatatttatccggttcagtaataataacgccgttcactacggccttatcaattttgacgtgcatatggcccgcgactatggccgctagctccgggttggctttggcaatgtcccccacgccagtaccgggacgctggttctcgttatcaatccccatatgggcaaccagcacgatagcgtcgacctgcggctgaatttgttgaatcaccttcttaacttcttgcacaggatcggtaaaattcagccccttgatacgatcggtaccttgggcaaattccgctgtcattggcgtatccataccgatgatgccgattttgacgccctggcgttcgataatcttataagagggcaggtaaggcttgccgctgtcccagaagatattccccgccagagcggtacctttaaactggtttaaagaggtggatagaaccttcagaccgaaatcgaattcgtgattacctagcacccaagcatcgtaattcagggcgttgaaaccgagcatcatcgggctgacggcctcgtttttaaaggtttccacgaagttgccctgaatggtatcaccggcgtcaaccaaaatgatattgggctgttcggcgcggatttttttcacctgcgtggcgatttggctcaggctgccggccagattttcactgtcgctggcatagtcccagggaacgaaggtgccgtgcagatcggaggtacctaaaatcgtcaggttgacagtttcagcggcgaaggaggaagaggtgctgatacaaagtaaggaggcgagcgctatttttttcattttaatcttcttgaaggggccaatgtttcatcatgtaaccgaattttatgatgcaacaaaatagcaacacaagcgaacgcttccccaagaatcgattaatatattcatataaattgttaagttgtgattcaactcaccatgaagattataaattaaaaaagttaatcttgatcgcggaaaaatgaaaaaataaatcattacttaaaccattaaatcacatttatttaacactggaggtttatataaaaatatttgaacgattaattaacacctccagaagaaaattgttctaaatcaagttttcaatatggcaataatgttcatatgagcttaaattgttctggatcaatttgtcctgctatcgataattagttggtttgttgacctgtatccagaactcaaagccaggtcacgtaaaatcctatttattgtatgggattagaagcgtactattatcgcggtgtaatactgggtagttgatattgttatttttgttgtgtttttttgggcattcactgctggtagttatgagacttccaattatagcggaggtcgcgttgccgcaagtcggagtcttcctgcgaggagcaaggagtcaagatgtttgatattgtcgaactgtcacggttacagtttgccttaacggctatgtaccatttcctatttgtcccgctaacgctgggtatggcgtttatgctggcaattatggaaacggtttacgtactgtctggcaaacaaatctataaagatatgaccaaattctggggcaagttatttgctattaactttgctctgggggtcgctacgggtctgactatggagttccagttcgggactaactggtcatatttctctcattacgtcggtgatatcttcggtgcccctctggcaatcgaaggtctgatggcgttcttcctggaatctacttttgttggtctcttcttcttcggttgggatcggttaagtaaacatcagcatctggccgttacttggctggttgcattggggtctaacttctctgccctgtggattctggttgccaacggttggatgcaaaacccaattgcggcggatttcaacttcgaaaccatgcgtatggaaatgctaagtttctctgagctggttctgaacccggttgctcaggttaaattcgtgcataccgttgctgctggttatgttaccggtgcgatgtttgttctgggtatcagctcgtactatctgttgaaaggccgtgatattccgtttgccaaacgttcctttgctatcgctgccagctttggtttagccgcgacgctgtccgttattgttctgggtgatgaatccggttacgaaatgggtgacgtacaaaaaaccaaacttgctgcaattgaagccgaatgggaaacccagccgcctccggcagcctttacgctgtttgctattcctaatcaggaaaaaatggagaactcgttcgccattcaaattccttatgcattaggcttgattgccactcgttcattggatactccggtgaccggcctgcgcgatctgatgtcacagcacgaagtccgtatccgtaatggtattcaggcttatcgtttgctggaagaactgcgtgcgggtaacaccgatccggctgttcgtgccgagttcaacaaaaccaagcaagatctgggttatggcctgttgctgaagcgttacacgccgaacgtaactgacgctaccgaagcgcagattcaactggcagcaaaagactctattcctaaagttctgccgctgtacttcgcgttccgcatcatggtggtctgtggcttcctgctgttgctgattatcggtctctcgttctacaacgtatgccgtggtcgtatcggtgagaaaaaatggctgcaccgtctggcgctgtggggtattccattaccttggatcgcgatcgagtctggctggtttgtggctgagtatggccgtcaaccttgggcaatcggtgaggttctgcccactgccattgccaactcttcggtgacagcaggggatattctgttctccatggcgctgatttgcggtctgtatacgctgttcctggtcgcagaaatgtacctgatgttcaaatttgcgcgccttgggcctagtagcctgaaaactggccgctatcactttgaacagccgactgcgcctgcgcaagaagcacggtaaacgggagtccacttatgtttgattatgaagtattacgatttatctggtggctactgattggtgtgctactgataggtttcgccgtcaccgatggttttgatatgggcgtaggtatcctgctacgcattatcggtaaaaccgatactgaacgccgtgtcatgattaactcgattgctccccattgggatggcaaccaggtttggttgattaccgccggtggtgcgctgtttgccgcgtggccaatggtgtacgccgctgccttctccggtttctatattgcgatgattctggtgttggctgcgttgttcttccgtccggtcggttttgactaccgctcgaagttggaaagcagccgctggcgcaatatgtgggactggggcatcttcatcggtagcttcgttcctgctgtagtgttcggcgtcgcctttggtaacctgctgcaaggtgttccattccatatggatacctacatgcgcttgttctacaccggcaacttcttccaactgctgaacccgttcggcctgttggcgggcgtagtcagtctggccatgttggtgactcagggtgctacctacctgcaaatgcgtacccgcggtgaaattcatctacgttcccgcgctgccgcacagatttgtgcgttagtgatgggcgtagccttcctgctggcgggtatctgggtagtgaaaggtatcgacggttttgtgattacttcagcgctgaacaccgctgcggaatccaacccgatgcgtaaagaagtggcacatcaggcgggcgcctggttgattaacttcaacaagtacccaagcctgtgggcgctgccagcgttaggggtaatcctgccgttgttcaccatcctgttctcgcgtatggaaaaatgcgcgttggcgtttatctcctcgtcactgacgattgcctgtgtgattttgactgccggggttaccatgttcccgttcgttatgccgtcaagtaccatgccgaacgttagcctgacaatgtgggatgcgacatcaagcctgctgacgctgaaagtgatgaccattgttgcgattatctttgtgccgctcatcctgctctacaccagctggtgttactacaagatgttcggtcgtatcgataaagaatatatcgaaaacaacaagcactcactttactaaggagcataaagcatgtggtattttgcctggattctcggaacacttctggcctgctccttcggtatcattactgctctggcgctagagcagagtgaggccaatgcggcggagaagaaagccgctaaaaacggcagcgaagatgttgtccgataagttgtacgctttaatggataagggcccgctgcgggccctttcacttattctcgccttcacgctggctttctgtattttctgggacccgacgcgctttgccgccgccaccagttcgttagaagtctggcaagaggtgtttttagtgtgggctgtctgtactggggtcatccatggcgtaggttttcgaccgcagcgggtatggctgagagcttttttctcgcctcttcctgcaattgtgatcttaggcgcgggaattttccattttttcgcctaatcttgcagctaatcatccctatgggccgttcggcccataattattttcgttctcaccttgcaagtcattccaaaccgaatcgctcttcagtatagtgtgtccgttaattgcattactgggaagtagagtgagtaatacgttatttcgatggccggttcgtgtctactatgaagacaccgacgctggtggcgtggtttaccatgcgcgctacgtagccttttacgaaagggcgcgcacagaaatgctgcgccaacgcaattttcaccagcagcaattgttcagtgagcatattgctttcgctgtccgacgcatgacggtagagtatctttctccagcacgtcttgatgatatgctagaggtggagagcgaaattactgaaatgcggggggcctctctctcgtttgctcaacgaattttcgattcccatggcaatcttctgagtagtgcagaagtattggtcgcatgtatcgatctacacaaaatgaagccaaaagcgcttcccaagtctattgtcgcggagtttaagtagtggctgacatgaacattctggatttattcctgcaggcgagcctattcgttaagcttatcatgctggtactgatgggcttttccattgcgtcttgggcaattatcattcagcgaacgcgcgttctgaatgctgccacacgtgatgccgaagcctttgaagacaagttctggtccggcattgagctttcccgtttatatcaggaaagtcaggcgcgccgcgatagtctgggtggctcagagcaaattttccactctggttttaaagagtttgctcgtttgcatcgcgcaaacagccatgcgccggaagccgttatcgacggcgcctcccgtgctatgcgcatctcgatgaaccgcgagctggaagcgttggaaaaccatatcccgttcctgggcaccgtcggttctatcagcccgtatatcggtctgtttggtaccgtatgggggattatgcacgcctttatctccttgggcgcagtgaaacaagcaactttgcaaatggttgcaccgggtattgctgaggcactgattgctacggcgattggtctgtttgcggcaatccctgcggtaatggcgtataaccgcctgaatctgcacgtcagcaagcttgagcagaactatgacaactttatggaagagttcattgctattctgcatcgccaggctttcgccagcaccgagagcaaataagtagggggttgtatggcgcgagtacgtggtcgtagacgtcgcgagcttaagtctgaaattaacattgtgcccttgctcgacgtattgctggtattgctgctgatctttatggccacagcgcccatcattacacaaagcgttgaggttgatttgcctgacgctacggattcgaaaacggtatccagcgatgataatccgccggtgattgtggaagtttctggtgttggtcaatatacggtggtggtcgatcatcaacggatggagcagttgccagagcagcaggttgttgcggaagctcaggcgcgtctaaaagccaatccgaaaaccgtgtttttgatcggtggtgctaaagaagttccttatgatgaaatcatcaaggcgctgaatatgctccatcaggctggcgttacttcggttgggctgatgactcagccgatctaagtctgtgttgatgtcgattaagcgcgaaatatcgctgtatcggcattgaccctgtttttgaatatcgagtgtggaaatcgagcgtgggaaaggcaaccgagcaaaacgataagttgaatcgcgccgttattgtttcggtcgttctgcacattatattaattggcctgctaatttggggctcgttgacgcagaagactgaaatgggcggcggcggagctggcggcgaagtgattgacgccgtgatggtcgatcccggtgcgataacacagcaatataatcgccagcagtcacagcaggctgacgcgaagcgcgctgaagaacagcgcaagaaaaaagccgaacaacaggcagaagaattacaacagcagcaggccgcagagcagcagcgcctgaaagagctggaaaaagagcggctacaggcacaggaacaggccaagcagtcggcggaagaacagaaaaaagcggcggctgagcaacaaaaacaggccgccgaacagcaaaaacaagcggcagaggcagcagccaaagccaaagaagaacagaagcaggccgaagctgcggctgctaaagcgaaagctgaagccgagcaggtagtgaaagccgccgccgacgcgaagaaaaaagccgaagcagatgcgaagaaagaggctgccgtagcggcggcagcgaagaagcaggcagaggctgacgccaagaaagcggcagaagatgcgaagaaggccgcagaaaaagccgctacagaagctaaacagcaggccgctgaagccgcagagaagaaagctgccgccgacgctgagaaaaaggctgctgctgatgccaagaaagccgcagcagatgcgaaaaaagcggctgacgccaagaagaaggcggcagcagaagcagcgagtgctacggatgttgacgatctctttggtggcctggcgtcatccaagaatgcgccaaaaagtggtactggcgcaggtgaagccgcagcaggtaaaggcggtggcaagaaaagcggtgcgtcgggtgcagaaatcagcggctatttaggccagattactgcggcgattcagagtaagttttatgatgcagacttgtacaaaggccgcacgtgcgatctccggattaaactggcaccggacggtctgttgatagacgtaaaagcggaaggtggcgaccctgcattgtgtcaggccgcgatagccgcagcgaaacaggctaagattcctaaaccaccgagtaaagatgtttacgaagtatttaagaatgcgccggtttcctttaagccacaataagtgttgattaacggggtataagtttgttaatcaaccacggattatgtagttttgtttgcgttggtttgttaaaattctgctaattatcgcgggcattccgctcggataagggagacaagatgaagcaggcatttcgagtagcactaggctttttagttttatgggcatctgtgttacacgcagaggttcgcattgagataacccaaggggtggactctgctcgtccgatcggcgtagttccgttcaaatggatggggccgggtacgcctcctgaagatatcggcgctatcgtgggtgcagacttacgcaacagcggcaaattcaacccgattgacgtggcgcgtatgccgcagcagccgtctaccgcagcggaagtgacgcctgcggcatggactgcattaggcattgatgccgtggttgtgggtcaggtacagccgggcgctgatggcagctatttggtttcttaccaattagttgatacagcaggtgcagcgggaagtattttggcgcagaatcagtataaaataaccaagcaatggttacgttattctgcccataccgccagtgatgaagtatttgaaaaactgaccggtattaaaggggcgttccgtacgcgtattgcctatgtagtgcaaactaacggtggcaaattcccgcatgaattacgtgtttcagactacgatggctacaatcagtttgtagtacaccgttctcctgagccactgatgtcaccggcctggtcggcggatggcagcaaaattgcttatgtaacatttgagagtggcaagtctgcactggttattcaaacgttggcgaacggcgcaatcaaacaggttgcttctttccctcgtcataacggtgcaccagcattctcacctgacggtaccaaactggcgttcgctttgtctaaaagcggtagcctgaatctctacgtgatgaacctggcgtctggccagatcagtcaggtaacggatggccgtagcaacaatacggagccaagttggttcccggacagccagaatctggcttacacctcagatcagggtggccgtccgcaggtgtataaagtgaatataaacggcggtgcgccgcagcgtatcacgtgggaaggttctcagaaccagaacgcggacgttagcgctgatggtaagttcctggcactggttagctccagcagtggaacccagcacatcgccaaacaggatctagaaacgggagccgttcaagtgttaacggacacgttcctggatgaaacgcctagtatcgcgcctaacggcaccatggttatctatagctcgactcaagggctaggttccgtgttacagctggtctcgactgatgggcgtttcaaagcgcgtcttccggcaactgatggacaggtaaaattccctgcctggtcgccgtatctgtgatgcatgtgtaaatacgtatgtatggcaaactataaaaaaggatcaaagagatgcaactgaacaaagtgctgaaagggctgatgttggcattgccagttctggctatcgctgcttgtagttctaacaaaagcgcaaacaatgaccaatctggcatgggcgctggcactggtacagaaagcagcaacctgtcttcagaagagcaagctcgtctgcagatgcaggaactgcaaaagaacaatatcgtttacttcggcttcgataaatacgatatcgcttctgacttcgctcaaatgctggatgcacatgctgcattcctgcgtagcaacccgtcttacaaagttgttgttgaaggccacgcggatgaacgcggcacgccagaatacaacatcgctttgggcgagcgtcgtgctaacgcagtgaaaatgtatctgcaaggcaaaggcgtttctgctgaccaaatctctatcgtatcttacggtaaagaaaaaccagcggtactgggccacgacgaagcagcattcgctaaaaaccgtcgtgcagttctggtttactaagagaatcgcatgaacagtaacttcagacgtcacctgttgagtctgtcgttactggttggcgtagcggtcccatgggccgctactgcccaagcgccaatcagtaatgtcggctccggctcggtagaagatcgagtcacatctttagagcgtatttctaacgctcacagccagctattgactcaactccaacaacaactgtccgattcgcagcgcgatatcgatagtttgcgtggtcagatccaagaaaaccaatatcagctaaatcaaattgtcgaacggcaaaaacagatctaccagcaaatggatagtctgggcgggcagggtgcgcaaaattctgcgtctgctgcagctggcgcgtcgacagagagtgcggcgacaggtggtggttctgattctgcggcgggtgcagcggctaatacagccgcaccggcaagcagtggtgatgagaacagcgactacaacacggcagtttcactggctcttgagaagaagcagtacgatcaggcgatcgttgcttttcaaaactttgtgaaacagtacccaaaatcgacttaccagcctaacgccaactactggttagggcagttgtattacaacaagggtaagaaagatgatgctgcgtattactacgctgttgttgtaaaaaattatccaaagtctccgaaaagtgcagatgcaatgtataaagttggggtgatcatgcaggaaaaaggccagggcgataaagccaaggcggtttaccagcaagtgatcaagcaattccctaacactgatacggcgaaacaagcgcagaagcgtttatctgctctttagtctttttaagcccagtaattggtctgatcggctaatttctgggcttgatcgtgtgaagaacaagcagttaaacgattgattcgaaatttaagttgcgctgcgaagaaaaattagtaatatatgccgccgttgccaagacaacttgcaaaacgttaaagcgacgaaaaaatagcttcatataatgggtcgttagctcagttggtagagcagttgacttttaatcaattggtcgcaggttcgaatcccgcacgacccaccatgatgaagtgatgtactgtttcaaatcgtagggatgagaaccgtgaaggttcgagccgaacgaagtgagacagcaacgcgaaggcgttgccccgtaagggtgagtccgcaggacgaatcatcccgcactttcaccattatgaagtgttaaaagtaaagtagttgagtagtaccgcatcacagcgggtcgttagctcagttggtagagcagttgacttttaatcaattggtcgcaggttcgaatcccgcacgacccaccattctttcctaattggctggaatgaaaagaagttgaagttatcgcagcgatattcctcttcctgttttgtctggttttattctctaagtgttgtaatgcaataatacataatgggtcgttagctcagttggtagagcagttgacttttaatcaattggtcgcaggttcgaatcccgcacgacccaccatgatgaagtgatgtactgtttcaaatcgtagggatgagaaccgtaaaggttcgagccgaacgaagtgagacagcaacgcgaaagcgttgacccgtaagggtgagtctgcaggacgaatcatcccgcactttcaccattatgaagtgttaagagtaaagtggttgagtagtaccgcatcacagcgggtcgttagctcagttggtagagcagttgacttttaatcaattggtcgcaggttcgaatcccgcacgacccaccatgatgaagtgatgtactgtttcaaatcgtagggatgagaaccgtgaaggttcgagccgaacgaagtgagacagcaacgcgaaagcgttgacccgtaagggtgagtccgcaggacgaatcatcccgcacgacccaccatgatgaagtgatgtactgtttcaaatcgtagggatgagaaccgtgaaggttcgagccgaacgaagtgagacagcaacgcgaaagcgttgacccgtaagggtgaatccgcttgacgaatcatcccgcacgacccagcattcccttctagttcagtcaactccccaaagaaagaacaatctcatactgtacgatttgtgtggtgcgataacacttcatgccagttttgaacaacgcttgcgttggcccgaagggcgagtatcaggatgatacgagtcacctgcgttcagattcgatccgtgagttgtgagtctgtgaaaatagtcaggcttaaaccttttatctcagctctgttattaatagcctccaaatcgtctctctatggcgctgtcagcgatcaaatacttcctttgccacctaagtctttttcatagactgcgccagatacgggctgctgtggctctttccattggatctaaacctggttgactcgtcgatcataattctaagctcggtaaaaccataaatagaaacgattcatctactatttttaactctattaaacatatttcgcatatatcaacaaattcgggcgactttcactcatgttttgggtattttgtttaggataaaaaacaaaatcccttattttatgtataacagcgtgagtaaccggtgtttttccatataccttgcgatgagatgtgagcgatgagcgaaatttttgatataaatgcggcgatttatcccttcccggcgaagccggcgcccttaaatctcgatgagaaggctttttatcgtcagaagatcaagatgttgctgaagcagcaggatgctgtattggtcgctcattactataccgatcctgagatccaatcgctggcggaagaaaccggtggttgtgtggccgactctttggagatggctcgcttcggcaacacgcatccggcttctacgctgctggttgccggggtgcgttttatgggtgaaacggcaaaaattcttaaccctgagaagcgggtattaatgcctactctcaacgccgagtgctctctggatttaggctgtccggccgatgaatttgctgcgttttgcgatagccatcctgatcgtaccgttgtggtgtacgccaacacttccgcagcggttaaggcgcgggcagactgggttgtgacatccagtatcgccgttgagctgattgaacatctggacagcttaggtgagaaaattatctgggctccggatcgtcatttaggccattacgtgcagaagaaaaccggtgcggacgtactctgctggcagggggcctgtatcgtccatgacgagtttaaaactcaggcgttgatgcagatgaaggcgctacacccggatgctgccattttggtgcatccggagtctcctcaggccatcgtcgatatggccgatgctgtgggttccaccagccagctaattcaggcggctaaaacgttaccgcagcaaaaactcatcgttgccaccgatcgcggtatcttttacaaaatgcagcaagtttgcccagagaaagaattattcgaagccccgacagccggtgaaggcgctacctgccgaacctgcgcccattgcccgtggatggcgatgaatggcctgcaggcgattgctgaaggacttgagcggggcggggcactgcacgagatacatgtggatgaagaattacgtcagcagtcgctgattccgcttaatcgcatgctggatttcgccaatcagctaaaattgcagacacagagtaatgcctgaattccttaatccttattattggcgagagctatgggttttcggaaatggttcgttaaagcaacggattgataaatataaagtttggcaagtctaaagaggccgcttcggcggttaactaaaaggattatcggatggactttttcagtacgggtaacatattggtgcatatcccgctgggcgtacagggatacgatttatcgtggattgaagccattggcactttatttggtttgctgtgtatttggttcgccagcaaagagaaaattattaactatctgtttggcctgattaacgtgacgttatttgccgtcattttcttccagattcagctgtacgccagcctgttgcttcaagtgttcttctttggtgccaatatttacggttggtatgcgtggagtcgtcagaccaccgataatcagatcgagctgaaaattcgctggctttcactgccaaaagcgttgggatggggcgctgtgtgcgtcatcggtattgcactgatgacattcaatattgatcgcgtctttgcctggctgacaggaataaccgtcgccattatgcaggcattcggagccaacgttcaggtgccgcatttggaaccggattctttcccgttctgggactcaaccatgatggtgttatccattgtggcaatgattctgatgacgcgaaaatacgtggaaaactggctggtttgggtggttatcgatctgattagcgtggtgatttttacctatcaaggcgtttacgtgatggcgctggaatacgtcatcctgacgttgattgccctgaatggctcgtggctgtggattaaagccgccagagagaatcattcgcaaccattagccgttcagagttaagtcagtatttacttttgatataaaggcctgacagcggcattgcggctgctgtcaggcacggatactaacgatttagtggtgatgatggtgagcgctagcggaagtcgcggcttgattaatatcgcagtctggttcttcacagtgctgatattccatctgaatcgtggcgtgcccaatctgatagtgatgcagtaaataatgctgaatgcgttgcagcaactcatcgtgatcgcgcggcggaatcacctgcacatgcaaggtcatcacccgttgttcaccgactttccatagatgcacatgatgaacgttacggacttcactaatattcaggcagagcgatttgcgtaatttatcgatatccacatcctgcggtgcgccttccagcaattcatgaaaactctctttcagcaggccccacgcgctgcgtaaaaccagcattgaaaccagcacggacaagatcgggtcgataggcatccagccggtggttaaaatcacaattgccgccacaattgccccgacagagcctaaaaagtcaccgataacgtgcagcatggcagcgcggacgttgatattttgctcctcgccatcgccgcgcaaaatccacagagaaaataagttggctaacagaccagcaacggcgacgatcagcattggcgtgcccatcacctcatgcggcgtaaagaaacggctagcggcttcccataaaataaataccacgatcagtaataacgcggctgcattgacaaaggcggctaccgtcgttaagcgcagatagccaaaggtatggttggcgtcaggtttacggcgagaaaagcgaaccgccatcagtgcgataaatagcgcggctgaatcagtcagcatatggccggcgtctgccaacagagccagtgaaccagatagccagccacctatcgcttccgcaaccataaatacggtcgtcacgataaaggcgataagtaggcgcttactgttactgtttttcggggagtttggagttgttgtcatcattcatcctggattttgacaaagcaatttacgacaaaacctagctgatactttgggttatcaaaaccatctgctgatggtttgctaagtgagtattgaagatatcttattcaacttatcaattgtttcatctagtatcttcaataactgagtataggtttcctcggtaatttttccttgctggcattgaataactacctgctgacacaattcagcctctggcgcgtgctgtaaaatcaggaagctgcctttagttctatgggcggctttctctatagtggaaagagaagcatctggctggctaagtagctgtttatcctggatgagggaatcgagcagcgtgctagtcagtttgtgcatcatctcactattttgatgcgccaatgattggagagttttctccagatcgctgaaatcggtcggtgcagcaagagtggtcgcttccacacgtaaaatattttcaatggcagccagagatatgggtttggtcagccagtgatcaatcgccacttttcccggcagaattcgggtgaattcttgcacatcggcagaacaaagaatgatttttgccggagcttgatcttgctgacgttcgatatagcggatgatttttgccagcgtaaaaccgtccggatgcggcatattgtaatcaataaacaataaatcaaagggttgctggcggtgggctttaaggaaatctcgaccattctcaaacaattctgacgacatacctaagtggtttagctgttgctgcataagcagtaaattggttggatggtcgtccacaaccgcgattcttaacggttgtagcgccgtcaatggcacctgcgattgctgtgacggcaggctaaccgccggttcttcctctgttagggtggcgggcaggctgatgtctacctgcgtaccctgaccgtataccgaggtcaagttaatctcgcctcccatacgttcaatgatttctttgcaaatggataaacctaaaccgctgccttgtaccgacaagcttttgctatttccagcgcgataaaatggctggaacaggtgaggcaggtctttggcggcgataccgcagccgctgtctttaacctgcaataatagtttgccgtgggtatctgtttgaggctgccactgaatattgacgttaatttctccgctttgggtgaatttaatcgcattggtaatcagattattgatcacctgaagcagtcggcctccatccaccaaaatcgcccccggtaaggactcactctggctgacagcgaagctaattgggcgcattcccaaaagcggttgataaacggcgcggatatgcccgatccacggttccagtggcgtcggtttaggattcagttgcaggctgccggtttcgagcttggcgtaatcctgtaagtcattgagcaagctcaataaggatgaggccgaactgtatatcaccggtaagttatccttctgatgattagcctgctttaactccagctccagcaaccccagaatagcgtgcatcggcgtgcgtaattcgtggctaatcatcgccagaaaacgacttttcttactattggcggcctctgcctcgcggcgcgcctgttccaaccaattccgctcccgttgctcttttcgctgctgaatgaaacgtcgtagcaatacaaagagtaacccggcaataatcagccccagtaaggttagcaaccaaccggtttgcggtatcatgcgattatcattcaccgcatctatcaaactgctgcgatccgaggtccagccttcgcgcagcgattgcagagtggctggcggaatttgcagcagatttttattgagaatagacagcaatagtggcgtgtcacggcgcacgccaaacgcaatgggataagcgatgttgttagcggcaaaggccagttttatcgcgccggcatagcgagataggacaataaagttggcggaaattacgttatcaatcaatgcatcgacctgaccattcgccagagcattgtaaagggctttactgttctcaaaactgactacgctaaaaccgtcgggaatcaggtgttgccccagatttccattcactacgccaatactcttcccctctaaatccttccaggtagaaatattgttagcgtattcgcttacataaacgccccacaaagcccgatgaatgggagtggtgctgtcgtattgttctttaaaaccccgggttaatggcaatacggctcggaataatgcctgtttatcgctgacctgctggtctgcctgttgcgggttgctgctccagaccggagcgaattccagcccggtattttgagctatgatattaataatatcaacgatataaccatgaggctcgtcgtcagaacctcgatagctgaaagggtagtcattttcgattgcggcatagtaaatccgcggatttttcttcacccattcctgttccaactgcgaaaggtcggcgttgccggtatccagatagctgggaatttttttgctccagcgattctgaataacattggccatcgacatgggcaaattgctgataacctgatcgagcatctcaattaacggtttatcggtagaggcaaaaacaaaggataaattgcctaatttaatcgcgctttcaacctgatagatctgcccgagctgtagctgatcgataataaaactggcgctggtttcatcggcaataaagtaatcattggtgccatttaataatgagtaaaccgcctgtaaattactgtcgaataagcgtacgttggccgtctggctatttatttcgtcataagcctgcataccggtaattttgctgatggcaattcgggcattttccgagttcagcataatggaacggttattttgccggttgcgcagtacgcgtaaattactgacgtaataaggggcagaagagaacaggttaggcgtaaaggcattttgcggtatgccaaatagcaggtcgatctgtttgtttttaattgccagattgagctgcgccagatcggtaaagccgtaaatggcaatatgggcaccggtggcttgatgaatatagtttagatagtcggcgttcaggccatagagatcgtcatcaacgataatattgtaggggctgaggttatcgctcaaaatccccacacgcagggttttgccgtgccagtcattcttcagcgtagcaaaggtctgatcggtggggacgttgatgctactaaccagattatagcgtaccggttcggcggcaatcgctcccgtaggcaggcagaactgaataagggtcaggagcaaccaaatgaatttcatggctgtagatcgttaaatacggcaattaattcaagaagattcgccgccccagttttattcaaaatattctttttatgcgtactgacggttttattactgatgtttaacatttgcgcaatatgcaaattggagttccctttcgctaataggcccaatatctggatttcttttggcgtgagattatgtttttcataattatctgccgaggtaacaaaagaaatttcttccgggaaagcggtattacctgcgagtacctggcctatggcatctaacaggtgagtcatctggctacctttgtgcacaaatccttgagcaccggcgctgtgagccattttagcgtatacctctgtctcttgcgaggtatagacgatcaccggaagctcggggtaatggcgtcgaattctgcgcaggaattgcaggccgtctacttgcggtaagccgatgtcgaggatcagcaattcaaaaggctgttcggctagacgctggactgcctgctggtcgtcggagacactttgcaattgataaggaatggccgattgaagcagcgcggcttcaagggcgacgtgtacaacgggatggtcatcaactaagagcagccttggcatagtgtccttttatcctctgatatatatatcatcccaaataataactttgctaaattcattatgagtgagataagtacagacgaatagggaaatatttataattgttaataaaataactaattaaaataagtatatttcctatagatagcaaacaaataagtatcaatgtttctgatcggtagatacaggttatttttagccgcatatgcgcctggcggagggctggatttagggactgaacctaagtggtatacctaaagcgataaagtagatttacagcgttccattgacaggctagattggttgaaacctcaaatatgcaatgattgtcataagactgaatggaagagctatgaattaccagaatgatgatttacggattaatgaaattaaggaactcctgccccctgttgcgctgttagaaaagttcccagccagcactcgcgcggcagaaaccgtcgctcaggcccgcaatgcgattcatcacattctgcgtggtgcggacgatcgtctgctggtggttatcggcccttgttcaattcatgacactgaagcagcaaaagaatatgctgcgcgcttgctgaaactgcgggaagaactgagcggtgagttggaagtggttatgcgcgtgtattttgaaaaaccgcgtaccaccgtgggctggaaaggcctgattaacgatccgcacatggataacagctacgatatcaatgaaggcctgcgtctggcgcgtaaactgctgttggatatcaatgacagtggattaccagctgccggtgagtttctggatatgattacgccgcagtatctggctgatttgatgagctggggcgctataggcgcgcgaactaccgaatctcaggtgcatcgcgagctggcttctggcctgtcttgtccggttggtttcaaaaatggcaccgatggcaccattaaagtggcgattgatgcgatcaatgccgcgggtgcacctcactgcttcctgtctgtgacgaaatggggccactccgcaatcgttaacactgccggtaacagcgattgccatatcatcctgcgcggtggtaaagagccaaattacagcgctgcgcacgtgagtgcggtgaaagaagggctgaataaggccaatctggcagcgcaaatcatgattgattttagccatgccaacagcagcaaacaattcaagaaacaaatggaagttggcaccgacgtatgtcgtcaggtagctgagggcgaaaaagcgattatgggcgtgatgatcgaaagccatttggtggaaggtaatcagagtctggaaagcggtgagccgctggtctatggcaaaagtatcaccgatgcctgtattggttgggaagatactgaagttctgctaaaacagttggcaaacgcggtgaaagcccgtcgcgactaacaaattgacgtagaaatagtgggtatcagtgagtaccgagaataaaaaccccgccggagcggggttttttatggatgaaattcatccggcgaattacttcgctttaccttggttagccacggcagctgctttcgctgcgatttcgtcggcattgcccagatagtaacgtttgattggcttcagattttcgtcaaattcataaaccaacggcacgccagttgggatattcagctcaagaatttcatcttcgctcaaatcgtccagatatttaaccagcgcacgtagagagttaccgtgagcagcaacaataacgcgctcaccgctagcgatgcgcggtttgatttcttcgttccaataaggaataacgcgttcgatggtcagtgccagactctcggtcgttggcagctctttgtcagacagttttgcgtaacgcggatcgtgtcctgggaaacgttcgtcttctttgctcaactctggcggagtgatggcaaagccacgacgccattgtttaacctgctcgtcaccgtattttgcagcggtttcagctttgttcaggccttgcagcgcgccgtaatgacgttcattcagtttccaggatttttcggtaggcaaccaagcctggtccagttcatccagaatgctccacagggtgtggatagcgcgtttcagtacggaggtgtaagcgaagtcaaacgtgaagccttcgtcttttaacagcttacctgccgcttttgcttcggtacggcctttttctgacagatcaacgtcataccagccagtgaagcggttttcgttgttccactgactttcgccgtgacgtaccagaaccagctttgttactgccatagttcgaactcctcagatgtctaacttattcaatgataactattatcattatattgcgggattactgcgaacagcaatcgattgtgtttaaccatagccaattttttgccgcaaagtaagactctttgccgaatcgattcgtctataagtctatgcagcgaacaaacggggtactaaacataccccgcagcgccacatctagcaatgaaactggattacgcagcttttttcaggcaggtgctcatgaaggttttgcgactatcgcctttcagatctttggttttggcttcggcgttacaggatttcattttttcctgctgcggtgtcattgccgccggtgccactggtgcaccggctttcaggcaggtgctcatgaatttcttacggtcgtcacctttcagcgccttgctggtggcttcgtggttacagtcagtcatttttttctgctgtgccagttgagccggagaaggcgtttttgccgtatcggcagccattacgtttgcgctgagcaaaagccccgcggataacaaccacaatgtagtcaggcgcataacatttccttttggttcagtaagcagaatgaatatcgatccgtcgcgagccattaacacaggctgatttcacgatgagagatagctacctcaaatcatggagttgcctgttattggctttacggatgactctaagcgtagtcggcgtcgttgaggaagggtaggaacgggcgaaaaatcagttatatcttatgccagaaggcggggtggaaggaaagaaaactctccgtaaacaatatgttacggagaatgtgtggtcgtgaatactttattttaaaggtattacagcgccgtaaattgataaaccgtggtcgcgcggtagcgtttgtccggagtgacccaacagtcgggctgtggccattccggatgattagggctatcgggtaaaaatccactttccagcgctatacctgcataattagcgtaagttccgccgagtcgagccggtgttccattcaggaaattaccgctatacagctgtattgccggtgcggaggtaaatacgctcattttgactttgccatcggctgaccatacatgagccgcagggctgtcgattgcgccgcaggttcggtggagcaaataggcgtgatcgtagcctttaacccgttgttggcagggatctttgaggaaatcctgtgctagcgtttttggctggcgaaaatccataccgctgtgttctacgctggctaaaggttccgccggaaggcctgtagtgtccaccggcaggtaacgatcggcgaaaagttgcagccgatgttgtcgtgcgtcgcgacttttaccatccagattgaaataggcgtggttggtcagattaattgggcaaggctggtcgaccgaggcctgataatcaatttccagccgattgtcatcggttaaccgatagtgagtttcgacgatcaaattgccaggaaaaccctgatcgccatcaggggaatgcaattgataacaaacctgacgtttatcctgatgaataatctgccagcgccgggcgtggaacccttccggcccgccgtgtaactggtttggaccactgttggcgaccagaggaaaaacctgtccgttacgctgcaattgagcctgagcaatgcggttggcgtagcggcccacggtggcacccaaataggcaccttgccgcgggtaatcttccggattcgggcagcctagcagcaattcacgtcggcccccatcgttaagcggaaaaacagccgaaagccaggttgcgccccagtccatcaggctcaccgacatgcctgatttgttgcgtaattcggttaactggaacggctggccgtccggcgctaatgcatttttcagcatattccggctcctgccgaagcctgacaaacatagaatgtttcccgcataccgccggttttttgcggatattccagagcgacggtcgcacgtacttgctcgactaaatcctgaggcatcagcgcgacaatgcagccgccgaagccgcctccggtcatacggacaccacctcgctcaccaatgacagatttcacaatatcgaccaacgtatcaatggctggcacggtaatttcgaaatcatcacgcatggagatatgagactcctgcattagctggcccattaatgtcagatcgccaagagccagagcatcggcggcagcctgcgtgcgcgcattctcactaataatatggcgtgcgcgtttggcaactatcggttccatttcgctctgattggcccggaactgtgccggagtgacgtcgcgcagggcttttacaccaaagaagcgagcggcagcttcgcattgttggcgacgagtgttgtactcgctatcgaccagaccccgctttacattggaattgattatgactacggcgacgttttttggcatagcaaccgggcgggtttccagcgagcggcagtcgatcagcaacgcctgatcctgcttgcccaatgccgagattaattgatccataatgccgcagttacaaccgacaaactggttttctgcttcctgaccgttgagcgccagttccacgccgctgagcgggagctgatagagtgcctggaatgcctgacctaccgcgacttccaacgatgcagaggaacttaaaccggcaccttgaggcacattgccgctgatcgccagatcggcaccgccaaaatcacggtttcgcagcaacagatgtttcaccacgccgcgcacgtagttggcccagcgcagttcagggtggctaacgataggttcatcgagagaaaatatatcttgctggttatcataatctgcggcaatcacacgaatctgtcgatcatcacgtttcgccatgctaataaccgtggcgtaatcgatcgcgcagggcagcacgaatccgtcattgtaatccgtgtgttcgccaatcaagttgacccgaccgggtgcctgaatggtcagggcgggttctttggtaaaaaattggctaaaaacggcctgggtatgttgttttaaagacattattgaactccagcttctcgataatgaacatcactgactgcccgcaggtgctcagccgcctgttcagccgtaagatcgcgctggctttccgccaacatttcgtaacccaccataaattttcgcaccgtagctgaacgcagcagcggcggataaaaatgtgcatgtaattgccagtggcgattgtctgtatcgttgtagggcgccccgtgccaacccatggaatagggaaaggagcaggagaataaattatcgtagcggctggtcagttttttcagcgccagtgccaagtcggtctgctgttccgaggtgagctcatcgatccgcatgacctgggctttaggtagcagtaaagtttcataaggccaggcggcccaataaggcacgacggccagccagtgctcggtttctaccacggttcggctgccgtcggcggcttcccgacggacgtaatccagtaacagtggcgatgaatgctgttcaaaatagtttttttgcagccgatcttctcgttcggcctcgttgggcaggaaactgttggcccagatttgaccatgggggtgcgggttagagcagcccatcgccgcgcctttattctcaaaaacctggacccacggataggattggcctaattccgcgctttgctcctgccagcttttcaccacgccggccagttcaggcagagaaagtaacggcagggatttactgtgatcgggggagaaacaaaccacccgactggtaccgcgcgcgctttggcagcgaatcagaggatcggcggtttccggcgcatcgggtgtatccggcatcaatgcggcgaaatcattggtaaatacataagtgccggaataattcgggttcgcatcaccggtcacccgtaaattacccggacacaaaaaacaatcaggatcgtgagcgggctgttctcccgtggtcaatggttcttgctgcccttgccacgggcgcttggcccgatggggagaaacgagaatccattgatcgctcaatggattatagcgacggtgtggatgatccacgggattaaagccagtcatttttcttccttaatcaggataaccttgaggattttgtgattgccagcgccaggtatcgatagccatttcgtccagtgagcgctgtacgcgccaatccagatcctcggcagctttggttgggtctgcccaataagcggcaaggtcgccttcgcgacgtggagcaaaatggtacgtcagctgtctaccgcaggctttgctgaaggcattcaccacgtccagcacgctgtggccgcgaccgccaccgaggttataaatatgtactccagctcggttgtggcattttttcagtgctgcaacgtgaccatcggctaaatctacaacgtgaatataatctcgcacagcggtgccatcggcggtgggatagtcattgccgaaaacggccagagaatcgcgtcggccgacggcgacctgcgcaataaacggcattagattattgggtacaccctgcggatcttcgcccatcagcccggacggatgggcgccaaccggattgaaatagcgcaaaatagtcatgttccatgcggcatcggcacgctggaggtcttgcagaatattttcgaccatcagtttgcttttgccgtagggactagagggaatgcccgtggggaagctttcgacataagggatcttgggttgatcgccgtaaaccgtggcggaggagctgaaaataaagtttttaaccccggctgcagccatagcttccagcaataccagcgtgccgcagacgttattatcgtagtaggccaagggtttatttaccgattcgccgacggcttttaaaccggcaaagtgaatcactgaaccgatagtatgctggctaaagatatgatccagtagtgcgcggtcgcgaaggtcaccctgataaaacagtggcgattgccccgttaattgatggatgcgttttaatacgctggatttgctgttgcataggttgtcgataacgattggcgtatagcccgcttcaattagctgcacacaagtgtggctgcctatgtaaccgctaccacctgtcactaaaacatacatacaaagctcctgaatcgtacttatgagatgaagataccacgccaataacggtaaaaaagtgatctaacatcaaaaatggaatcgtttacactcatattcaataaggcattgaacagcaggcatacagtcagtctgaagggcataagaggggaggaataagtgtagcattatggtaacgctttcatccacctaaccgacaggaatgtcctgccggttgatgaattcagtgtggcagatctgcctagtgatgcagtgccaacgggtaggtaaagaacagcagatgagtcagattcagcgcgaaatggaaggcaacggcgatccacaggcggccactccacatccatgccagaccgtaaatcacgccggctagcgctgcgaagaccatcaacagggggcctccgggataatgcgctgcaccaaatagtaatgaagcaataatcagagcgggaaatgcaccaagccactggcttaaacgctgttgcaggtagcagcggaacagcgcttcttcaaccagacagacaaagaacaggttgccgataacaaaagtaccgagccattctggcgtgtgcagttcgattttcaggccgcctaaacccactgccagcagcaacagtgctggaacagccagcaccaatacagcccaaccgactttccctacggaaggatgttttttagcaacaaataagcccggcaagcagcttaacagaacaaagggaatcagagctttgtccagattgtaatacattgagaacggggcgctgagtggcccgatctgcactttatccagtactttcagattgttgaaacccggaatgtaatggaagaacagcgccacagaagccgctaccaatagcaactctaatccgccagccagccaggttatctggcggtatttttgcaatgctaacgaggcgagcagaattaacaacagtgcggtgatggccggtaaggtcagtacgccggtcgcagtggcaatacctaaagtaatagccaaaagtaacagggcgatgatccggttaaatggcaaaaagagtaacgaagcagcaagaacgccccacatagactagtccctttatgtgttgaatttagtgatagattcagcgccgatagccctggcactgaatgtaaatccgatcgatgtctatcgatcggcataaataataacataatgaaatggattaaaaggtcgggtcagttgtcgacaagccgatttgccagtccgaactgcgccaattgcccttaaggtaacgctctaatcaggtagttggctaaactggtagcgataaatatcgccgtcggcaataaaacttaaacgatgagttatgcactctggcgcgtcttcagcgtgatgagagacaaataacagctgggtttctccttcgccaatcatgacatcaataaaacgccgcactaacaaacggttcagcggatccagcccttgcaacggttcatctaatatcaacagtgccggatgttttaccaaagatctggcaatcagcgccagccgttgctgtccccatgacagactgtgaaacggctggtcagctgccgcgccggacaaaccgagcaacgccaaccatttatctgccaactgccgctgtcgatcggaaactgtctgataaataccaatggaatcaaagaaaccggaaataatcacattacgcaggctggcgctgacgcgataatccaaatgcaggctgctgctgacataaccgatatggcgtttgatatcccagatggtttccccgctgccgcgacgacgaccaaatagcgtcagatcattactgtagccctgcggatggtcgccggtaatcaggctcagtagcgtggattttcccgctccgtttgggccaataatctgccagtgctcgccgcgatttacctgccagctcagattgtgcaaaatgggacggtcgttgtactccaccacgccatttcgcagaataattaacggattatctactgctaatgaaggttgttgctgcgggtcttctgcttccggcagggatagtccatccaagttttcactgtgagccagttgggcgactagggcttcggctaaaacctgcttacgttcacctaaactgactaaatggcaatcggccaatactcccactttttgaataaaatcaggaatatcatcgaatcggttgagcactaatatcagcgtcacgccttcagcggacagttccgccagatgtcgcgccagctgttctctagcggcgacatccaatccgtcaaaaggctcatccagcactaacatatcaggctgcggcatcagagcctgacagagcagggctttgcgggtttctccggtagaaaggtatttaaagcggcgagataacaaatgaccgataccaaactgctgcgctaaccgctggcagcgctgcgggttggtgacctgatcctgaataatttccgcggtggtacggccggtatcgtcttcatcctgactgagcatatcggtattgttgcgttgccattcttcgctgactaactgctgaagttgctcgaacgataaacgcacaatatgccgaaaatcgctgctgcgactgccggtcaggagaattaactcatcggagagcgctctggctaacgctgatttaccgctgccgttagcgccgacaaaggcccagctatcaccagagtgaatatgcagatctggaagattcagcgttcggatatcgcttaaacgaaaacaaccttgcgctatatgcaactctgacatcattcctcccattttccgcaacgtatttacgttaagggataagcggattagtggggaaagtcaaatgacaaatctgcacgactgcgccggtaacgcagcgtacagataaggaaactgtgctaacaaagcgtggcgataatgactcgatcggcgttgaactgggcgataacttgcgcgccattatgtagattcagtttatgtaactcttgattggataaggtggcgcacaaactggctccgccgtgaagggtaacaatcacttcactgtagtcgcttcctggctctatgctggcgacgatgccgggcaatgagttgtctgctgctcctgccagcgctggatcggtggctaatttcacccaaggggccttaatcagcgccagcacctctttgcctgttgccagttgcaggcgatcggcgctttgttgagtgacagcggcggaaagacgagtttttccatctgccaggagaatattgatgtgttgctgaacctgatgatgatcccgctcagtgaccgtgccaaagaactgattgcgggcgctggtttgtaaggagaagcgggagattgctgctagcaggctgtccagcggcagtgaatcatctttcaaggtatcgaaagctttttgctgaatttgctcgagtaattcgtaaagttgaatcaagcgttcgccatagcgggttaaacgcgcgccgccaccgcctttccctccggttgcgcgatccaccagcgtttcttcggccagagtattcatttcattgatggcatcccaggcacttttatagctaatgcccgccagcttggctccttgactgatggaacctgtcaacctgacctgcttgagtagggcgatgcggcgcgggtcagcaaaaagacgctgctgaagctttagcgtaagaagaatttcggcttgcatggtcattttggctccggcagtaaaagcgccattgtgaccgattggcgtgcgggggcgcaaatcgcacttttggctggttacatttttttgtcagttgctaaaataatagggcttattcacttcaaatatggtttaaagtgaattattgaaagtggtgtagtataccgctcaacgagcagttaaatgaggctaccatcgtggaattattgaaaagtttggtctttgccgtggttatggtaccggtggtaatggccgttatcctggggctgatttatggtttaggtgaggtgtttaacgtcatctccaaaacaggccacggtaaagaacggggctaatgacatgctccttctgcgttgagtttttcttcgcagcgacctgaaattcaagaatgcccggttgatttccccaattggtttagctgttgcacaagttgcggccgttaaacgaaagggtttcaaccgggcgttttcgtttctgttatcccacgttatttctgccattatttctgtcctatcgctaacaactcaagatctgtcacagcttgccgataaactgcatgaccctgttatttgcttacgttatattgttcattacataacgatatattcactcggagcagaaaatgaaaaaacaatggggtaaatgggcactaggcgcggttgtggctgcaactttatctgggcaagccgcggcggctgaaaatatcaccgtcttcgctgccgcttctctgaccaatgcgctacaggacatttccagtcagtatcataaagagaaagatgtcgacgtggtggcttcttatgcctcttcatctacgttggcccgccagattgagcagggcgcgcccgccgatctgtttatctctgccgatcagcagtggatggattatgccattgataaaaagcaaattgttgataatacccgctacactttgctcggtaataaattggtgctgattgcgccaaaagacagcaaaattgataaagtctccatcgataaacaaaccgaatggaaaaaactgttagacggcggtcgtctggccgtgggcgatccggatcatgtacccgctgggatttatgcaaaagaagcattggaatatttaggtgcctggacaactctctctccggaaatggctcgtgctaacaacgtgcgtagcgcgatggcactggttgagcgcgcagaagcgcctttgggtattgtttacggctctgacgccatagccagtaacaaagtgaaagttgtgggtgtattcccggagcaaagtcataagccggttgaatacccaatggcaattgtcaaaggccatgagaacgccacggttagcgctttttatgattatctgaaaggcccagaagcggcggctgttttcaaacgttatggatttaccccacgctaatgatattgagtgagtatgaatggcaggcgatagtgcttagcctgaaagtttcgggcgtcgcggtcgcctgtagtctgccgttaggcattctgatggcatggattctagtccgctgccgtttccccggtaaatcattgttagacagtattattcatttgccactggtgctgccgccggtggtcattggctatttattgctgatcagtatggggcgacgcggtgtaataggcgaatggctatatagctggtttgggattaatttcagctttagctggcgcggagcggcactggcctcggcggtggttgccttcccgctgatggtgcgagccattcggctggcgttggaagcggtggatacccgattggagctggccgcccgtacgttaggtgccaatccgtggcgggtgtttttcactataactctgccactttccctacccggtgtgattgccggtacggtgctggcatttgctcgttcactgggggaattcggcgccactatcacctttgtatccaatattccagggcaaacccgaactatcccgctggccatgtataccttgatcgaaacaccgggtgccgaagcggctgcggcgcggctgtgcgtgatcgctattttgctgtcgctggtttcgctgttgctctccgaatggttagcgcgttggggtaaaaaacgcatgggggccgcatgttagtactggattttagccagcaactgggcgacctgaatctgcaggtcaacgccgaactgcctgcgcagggcattacggccatttttgggctgtccggcgcggggaaaacctcgctgattaacgtggtgggtgggttaagcaagccgcagcaaggccgggttgtgctgaacggtcgggtgttggtggatgcggaaaaacagatctatttaccaccagagaaacgtaaagtcggttatgtgtttcaggatgcacgcctattcccgcattatcgggtacgcggtaatttgcaatacggcatggcggcatcgatgcgttcccagttcgacaccatcgtgaatctattgggaatcgcgccgttattatcccgctttcccatgacgttatccggcggtgaaaaacagcgggtagcgattggccgcgctttgctgactgcgccggagttgctgttgatggatgagcctttagcctcgctggatttaccgcgcaagcgcgagttactgccttatctggagcgtttggctcatgacgtcaatattcccattctgtacgtcagccatagcatggatgagattttgcggctggcggatcgggtggtggtcatggatgcaggaaaagtgcgcgcagtcggcggtttagaggaagtctgggccagtagcgctttgcgcccttggctacagcgagaagaaccgagcagcattctgcgagtggcggtgattggccatcatgaacgttacgctatgaccgcgctggcgttgggcgatcagcgtttgtgggtaggtcatgtggacgccgagctggacagtatgctgcggattaaaatcaacgctgccgatgtgtctttggtgttacaaccgtcgcataacagcagtattcgcaatattattccggcgaaagtggcggaatgtctggacgtagacggtcaggttgacgtgaagctagcgatcggggaacagtggctatgggcgcgaattactccgtgggcgcgcgatgaactggcgctaaaaccgggtcaatgggtgtacgctcagatcaaaagcgtttcgtttaaccgcaaaggggaatgacgggaagtttgttgcccgcgcgcgattttcctcaggtctttatcagcgaaaaggctccataagtggagccttttgatgaatcaattctggatttccgaactcatcacgctaatacatgctgacgaatggcggcggcgatacccggctgctcgttatccgcgatcaccagatcggcacgctgtttaatggcatcggcgctgttacccattgccacgcccaaaccggcggcttccagcatactcaaatcgttaaagttatcgccgaaggcaatgacttccttcatgctcattccttgagattcaacccactgctgcagacgcttgcctttactattgcctgcctgtgcaacatccacctgatcgtgccacgaccattcgcaagccagacccaattcgtcttccaccatagtggcgaaggcttgcagtttgttggtatcggcgtgggatgtggcgaatttccagatggaactggcgctgcgagccgcgtcgtgcaggctattcacatgtacgatcgccggacgctgatgttcaggtaaatttccggcccagttaatcgagcggctaacgtggccgttaagatgttgatacagcatggcgtcatccacgtacatcaggccatgaatctcggcgtgatccagtagctgaattacctgaaccgcctgttgagctgatagcggatcggaagctaatacctgcttcgcctgataatcgtagagataggttccgttgcagcaaatggctggcgtatctagcgctaaagcctgataaaacgggtgaatcgccacgtgatgacggccggtcaccaccaccactttcactccggcggcgcgggcttcagccaatgctgacagcgattctggcaggatacgtttctggtgatctaatagggtgccgtccaaatccagagcaattacgcgataggtcatagcggtctcatcatttattcgattattaatacacattgaaccgatgttacaccggataggtgagggattaaactgaacagattgattccctgaccattatggcgagagcgcgcgcaggtgccgcagcagggcaggtaagccgtggtattggcagacaatcgttagttggcctgagtgattattctgctaaaacgagagctattttgcccaaaacgttgttctgctgctgaaagttgttatgccagcccagtcaggtaagctaggattcagttagccgcgtcacggcaataatttgactagcatgcatgattaaggagtagcgatgaatcaagtggtttatgtggcaagcccagacagccagcagatccacgtctggcaattggatacggcaggggctttaacgctgctgcaaaccgttgacgtaccggggcaggtacagccaatggcgataagccccgaccagcgccatttgtacgtgggtgtgcggcctgattttggcattgtcacttatcgcattgctgctgatggtcaattgcaggaagtgagtatggcaccgttacccggtagcccgacgcatattttaaccgacttacaaggtcgttttctgttctcggcgtcctacagtttcaactgcgttagcgtcagccctattgatgaacacggccatgtgcaagcaccgattcaacaaatcgatggcttgaccgcgccgcattcagccaatatcgatcctactaaccaaattctgttagtcccttgcctgaaagaagaccgcatccgtctgttcgatctgagcttaaacggtaaattgaccccacacgatcaggtgggcgtttccactgcagcgggcgctggcccacgtcatatggcattccaccctaaccataaagtggcttactgtgtaaatgagctaaacggtacggttgatgtgttccagatcgaagataacggtcagcaataccgaatagttcagacgctggatgcgatgccagccgattttgctgagactcgctgggcggcagatattcatatcacgccggatggccgttatttatatatcagcgaccgcaccgccagcctgctgggtattttcagcgtttctgaaagtggcaacgtgatttctctggtaggtcatcatctgacggaagcgcagcctcgcggctttaatatcgataatagtggccagttcctgattgcgtccggtcaaaaatccgatcatatcgaagtgtatcggattgacccggcaacgggtcagttgacgacgcaggggcgctatccggtgggtaaaggtccgatgtgggtgagtattctggctcctaaacatggataatccatttttagatttcagtctgttatcagtgagataacgggttgaggaacaaataataaagcagcgctctgtaaaccggtcgctgcttttttaatgccaataaaccggcttattctgcgacggccgcggtaatcgcctgggtcagacgggtgagctgttccggctgaataatatacggcggcatcaggtaaatcagtttgccaaagggccgaatccatacgccccgttcgacaaagccgcgctgcaaagatgccacatttaccgcgttttccatttcgaccacgcctatcgctcctagcactcgtacatcggcaacgccaggcatcgcggccagcggcactaattcacgctgtaattgtgtttcgatgctttgcacctgctgttgccagtggttgcccgccaacaaagccagattcgccaccgccacggcgcaggccagcggattacccataaaggttggcccatgcataaagcaaccggcatcaccattactgatggtttcagcgacttgacgggtggttaacgtagcggaaagcgtcatatagccaccggtgagggctttgccgagacaaagaatatccggcacgatttccgcgtgttcgcaggcaaagagcttgccggtgcgcccaaagccggtggcgatttcgtcagcaatcagcagaatattgtatcgatcgcacaacgctctaacttcacgcaaataagctggatgataaatccgcattccgccggcgccctgcacgatgggttcgagaataacggcggcaatttcgccgtgatgctgctcgattttttcggcaaaatcgtgaatatcgtctggattccactcttcatcaaaacggcactgcggtgcgtcggcaaacagatgattagccagataaccctcatataggctatgcattgagttttgcggatcgcacactgacatcgcgccaaaagtatcgccgtgataactgtggcgcagcgtcaaaatgcgctgacgcttctctcctttggcctgccaatattgcaacgccatcttcaaggccacttctactgccaccgagcctgaatcggctaaaaatacgcattccagcgtattgggagtcatggcgaccaattgtctgcacagcgcaacggccgccggatgagtaatgccgccgaacatcacatgagacattttccccagttgctcagtaaccgcctgatttaacacgggatggttataaccctgtatggcagcccaccacgacgacatgccatcaataagcagtcggccatcggatagttgtagctcgacgccgctggcagaaactaccggataacacggcagcggctgagtcattgaggtgtaaggatgccagatgtggcgctggtcaaaggcaaggtcagaaggtgtcataaggatctgttgtaaactaaattaaccatggaatggttgacagtatatcgagtttacataaactgacgagacttttctcattctttggagatgccaatatggcagatcgcattcactggacagtagggcaagcccaggccctgtttgataaaccgctgttagagttattgtttgaagctcaacaaattcatcgtcagcattttgatccgcgtcagattcaggtcagcactttgttgtcgattaaaaccggtgcctgtccggaggactgtaaatattgcccgcaaagctcccgttataaaaccggtttggaaagtgagcgtttaatgcaggttgagcaagtgctggaatcggcaaagaaagccaaagccgccggttcaacgcgcttttgtatgggggccgcgtggaaaaatccccatgagagggacatgccgtatctcgagcaaatggtgcagggcgtgaaggcgatgggaatggaaacctgtatgaccttgggaacgctggataaaagtcaggcgcaccgtctggcggatgcggggctggattactacaaccacaatctggatacctcgccggagttttacggcagcatcatcactacccgtagctatcaagaacgtttggatacgctgggggaagtgcgtgacgcggggattaaagtctgttccggcggcattgtcggtctgggtgaaagcattaaagatcgagccggattattggtgcagttggcaaacttgcctaagccgccggaaagcgtgccgatcaatatgctggtgaaagtcaaaggcacgccgatggaaaataacgaagacgtggatgcttttgattttattcgcactattgccgttgcacgtatcatgatgccgtcctcttacgtgcgcctgtccgcaggtcgtgaacaaatgagcgagcaaacccaggcgatgtgctttatggccggagccaactcgattttctacggttgcaagctgttaactacgccaaatccggatgaagacaaagacttacagctattccgcaagctgggcttgaatccgcagcaaacgtctactgagcacggcgatcgtcagcaacagcaggtgctgactgaccgcatcaaatacagcgatacgccacagttttataatgcggcggtctgatgagttggcagcataagatcgatcaaagcttgcagcagcggttagcgcaggccgcctaccggcgccgtcaggtgaatcagggttccactgggcgctttctgcgggtggaaaatcgccaatatttgaatttttccgggaatgattatctgggattaagtcaggatgcgacggtgattgccgcttggcagcagggcgccgctcgctatggcgtcggcagtggcggttccgggcatgtcacgggctacacgcaggcgcacgccgatctggaacaacaacttgccgattggctggggtgtcctcgcgcgttgttatttatttccggttatgccgccaatcaggcgctgctagcggctttaaccgccgcagatgatcgggtattggccgatcgccttagccacgcttccttactggaagcggcggcgagttcaccggctcagcttcgccgctttcagcataatcagccagaatccctgcaaaatctgctgaataaaccttgctccggccaaacgttggtggtgaccgaaggggtatttagtatggatggcgacagtgcaccgctggcggatttgcaccaacgcgcgtcggcggcgggagcctggctattggtagatgacgcccacggcattggtgtcagaggtgatgaaggacgcggcagttgctggcagcaaggggtaaaacctgagttgcaggtcgtgacttttggtaaagcttttgggctgagcggtgccgctgtgttgtgttcgcagccggtcgccgagtatttgctgcaatttgcccgccatctgatttacagcacttccatgccgcctgcgcaggcttatgccttgcagacggcgctaaaacgcattcaacatggtgatgatttacgccagcgtctacagcagaatctacggcagttccgtcagggcgcggccagcttgccattgcagttaactgcgtcagataccgccattcagccgttaattgtcggtgataatcagcaaaccctctctttggcgcagcgcttgcgggatgaagggctttgggtgaccgccattcgtccaccgaccgttcctcccggcggcgctcgtctgcgtattaccttgaccgccgctcatcagccggctgatatcgaaagattactggaggtgctacatgccacttgccattgatactgtgaataaacaggcgatagccagcgcctttagccgtgcggcaggtagctacgatggtgcggccgctttacagcgcgaaaccggtgaaattctgctggcattgggtcaacggcacccgggtactcaggtgctggacgcgggctgtggcaccggttatttcagccgtcgttggcgggatctgggcaaaaaagtggccgcattagacctggctcccggcatgctggagtttgccagacagcagcaggccgccgatgaatacttgttaggcgacattgaacatattcctttgtcgaatgagtcggtggatatttgtttcagcaatctggcggtgcaatggtgcggcaatttgcgcgccgcgctaaacgagctgtatcgggtcactcagcccggcggcataattttattttcgactttggccgcgagttctcttgatgaattagggcaagcctggcagcaggttgatggccagcgccatgtgaacgaatttctgccgttggatgatataacggccgcctgcggtggttttcgttatcaaataacgcaacgtattcatcatcagtatttcaacgatcttatcgagctaatgcgctccttgcagggaattggcgccacccatttgcatcaggggcgagctaatgggttgaccgggcgacgtcgactggcggcgctacaggcggcttatcctcagcaaaatggtatttatccgctgagttaccaattggtttatggagtgatttatcgtgattaaacgctggtttgtaaccggaactgatactgatgtagggaaaaccctggctagctgcgcactgttacaggccgccaatattcagggttatcgcaccgcgggttataagccggtggcttccggtagcgaaatgaccgctgaagggctacgcaacggcgatgccctcgctttgcaggccagtagtaaccaacctctcagttatcaacaggtgaatccactgacttttctggagccaacctcaccgcatattgtgagcgcggaagaagggcgtcctatcgatttttccgttttatccagaggcttgcgcgagctagaacagcaggctgattgggtgctggtggagggggccggcggctggtttactccattgtctgagcagcttactttcgccgattgggttatacaggagaaattaccggtcattttggtggttggcgtgaagctgggttgcatcaatcatgctttgcttaccgctcaggcgattgcgtttgccgggttgccgctggcaggctggatagcgaatgatgtcgtgcccgccgggaagcgacaggaagagtatatggccagcctgacgacgatgattgctgcgccgttgctgggtgtgattccacatttgcccgaagtggcgggacatccgttaggtgagtatctgaatattagtcggttaaacgattaagagcagatatgattcaggggcggcatatctgtaggttagtcagataattggctattttttcttaaataatcgcgagtatggtatcgttctttcaataattctgcgatcgtaaatagattctgaaaactaattcacaacatctatttatggtcgttatttgaaagaaaataaaactggttgtgataatgtaaatccacttaataaggctgattaacgctagattagttagtcctatgtcatcaatttatctttgtatcacccccagtgttattcaggtattggattgataattaatgccacttgggtttctggctcattattcataacgcagtttcagtggttaaaacaagaccgatcaatattcgattaatattaggaatgatattaagcattatttaaaaagccaatgcacgtcatctggtttatttctcatctgtttttaatttacaccagaggtaatggcatgacctttccagaactattaaaattactttctactggaacgaatctggatctcggtactgcggcaaaaagcggcggatgcacgattcaatttgataaaaacattgatgttacttttgagaatcacgataacaacctatatttattttctccggtaatgaatattacctcggtgttgtcggaagatttttttgcttcactattacaaattcaattatttggcattgcgacaaaccgctgctggtttggctatgatgcgggtggtcagcgggtgctgttattctgtttattcgatttaaataaagtgacgccagaagatgcaattgaacgtattgaggttttagtcgatcaggttcagtactggcagcagaatttaccgcagattgccaaattatctgacacccattcgggagcatatcgggttaatgacagctttcaacggccgaggtaaacatgaataatatttctttaccaagattcggtatgcagattttggcctacacggcgcttgatcgaagtcatttattaaacagtctggtgagccgtatttctggtagttcggataaacgtgacgagctggccaataaaataatttcaaacacggtaacccttgggcagaatgcgcttatttccaataagacgcttgggaagcgtagcgccgagattgtaaatcaagggcgaagcgtattctttggcaatacgctgcagcaggttgataaaggcgtcggcccgttggtcgagcttattttgcaatctaaaggtcaaggcggattggcgcaaaatatcgcttcaggtattgcccagtgtcttggcccggtcttattacaagatcatgcggtagaaagagttctggtggccttaaccgagcagaaagggggagaaaacgtcctcaaattggcattagagaataccttgtctggctatactggcggaaaaataatttcggccacgtttatgtcggcattaaaacgcgccatattggacaggccagaatataaaccaacgtcaccattacatcatatggcggcctggaaattacaccaatccttaacttctgatccggcatcactgccgccagccccgtttggtttacccaccatagaagccatcgcgggaactgtccctagtttggtcagcacggtttgtaagcaattagataatattcagaatttattgcagcttcctcttagcgaaaaagagctatcgagcgtattttcagaatgctggccaagtgatttggcggttacaaaggatatgacgagcaaaaatttcgccagtattgtcatgatggctcatgccacaaaacaagaaagtattctcgacgagaaaatcgcggaattgccggatggaatacgtcaatcattccagcagcaatgcaaagagataagaatatttttatccagaatacctgatgcgcaaatcaaacttgcccaaaattggtctggggggactgagagtatctcggtcaatcattctaaggagcactcaccgcctgcaaaattggtggattttatggataatcaatttcgcgcgccggttcatcatccagaagaagtggcttcctattttgccgatggcgctttcatcgacgcttttaaggccggtatcgatcttaaagtggataatcgccaccaaagttatggtcgttgggcgatgggaatggggaatcagttgttctcgcagctgcaaaatataattgggaacgatcgacaagaactgactcatgcacaaagggggcaactggggcaattatctgaaatggtagataataacccaatgagtttaatggccatgagccgttatctggtccctgaaagtattgtttcggccgttcaggatcaggttctcggccaatttactcgtcagggaccggatctgattcttgccgataatatctggatgaaagtaggtaagcctagcgtcagctttgcggtgagtaaaaataatggcgtggatattgatattaaactgacctggccgattagccagtttggtaaaaccgcacagacattagaagctgcgaaagatcatcaaagtcatatcagctcccaggtaaaagtacatatgcttttcaatgagaaaggcgttgagaagcaggatatgagcatctccgcgacccagatttcgcttagagatgaactcacgttaaccgccgcagaagatttgactgaaaataccccgatcgctttcctcaatcgaggggtattaaagcaggcgttcgaaacggcgtctaattgctaagtcacggtaattttttaaacttattacattagacgatactgtccgcacagcttcggaacaaacagatttcatcctcaacgcctgcggccattaaactgaataatgccgcaggtaatgtactcgctcgaacttcatatcaatgcttatctcgaataacagatttatcaaaccgttaagtattcggtgatcaaatcgtcatctaacagcgcaaattttccttgagccacatttcttccctcatcaatcaaataaaagcgatcggccacttgctgaatgttctccaaccggtgttcaaccagtaagaccgtcaggccaatattttggcataactggcgaatgacactgccaatttccgcatttagcgcgggctgatcaccgcaacccggttcatccagaatcagtaattccggttcgggaactaacgcgcgcgcgaatgccaacagttgctgttggttacgcgttagctccccgccgcgttgacggcgctgctgatgtaaaaacggaaagaaatcatagatccagtggggaataacccgatctttgtgacgcccagccagaagcgcgaccagcaaattatcctccacgctcagttgagagaagattggctgcccttgtgggacatagccaatccccagtgcggttcgtcgctctaccggctggtgaagcaggttttcaggcggttcccccccgggttgccaaaccatcgtgccgctttccactggaagatgacccattatgcaattgatcagcgtggtttttcctacgccattacgacctatcagacaggtacattggccgggaggtaactcaagattgatatcccatagaatatgggtgcgaccataaaattgattgaccgattgtaaacgtagcatcagaaaatctcctcgcttggctaggtgctgagggcgtaggctggctgagttctgcgagcaacttttgctgccgttaggccaatcctcagcataaaaatctcaagatatgaaaaaacgtgttggcataaagaagtgataaataaccagtttcagatattaacttgcggctaacggtgatttttactgctaaacagccgttttcagcactcagtctggcctattaacactggaacgcaactcccgctatcacgcttctgttacgccgaatcacagtgaaataagcaactctcgagccaggttgctaacgcataagaaaaaaccattatgttaggacgatgtaacgaaattatttggccacttgcgtaaaatttattggaaatggcataaaccgccggcagctacgggatggcggttgcacctaggcggtgccactctgagggggcgtggtgcaaaaaagaaacaatttgaatcggttgcgcggtggatgactcgtgtaggcggcgaatagcaaattagcaagggggatatttagcactaattgaaatatatagagaaataaaaatgtaaaaaaatgactaaaaaatcctatttggacctgtttttaccttaaccggcggttttctccagctcgcaccacagacgggattgagtgagttatccaccattcctgtggataaccttgtgtattagacacaaaaaactagtcgcaagcgagagaggacgcggcttatgccccggttgtctggattctcttctttttctaaatatacataaattacaataagttaattaaaatcaagacttgagtatttaacactggtggttatgtgtgatctttaatcaatttgttttacagaggttaacaactgcctctttctggggataaatggggtattgtcatgcaaatggcaatatggaatcgagataacggaggtgtcgtgccagaaccagcgctcttttccctatatttatacttgatgctggttttatatccagtatcatagcagtggaaaaaatctgggaggctcgcataattagcttcctaaccgcgcgtgattctccatcgggtagctaattcatgagtaaattattcaaactgcattctgagtttaagcctgctggcgatcagccggaggcgatccgtcaactggaagaaggtctggaaaatggcctggcgcaccaaacgctgctaggggttaccggctcgggtaagacttttaccgtggcgaatgtgatcgccgatctgaatcggccaaccatgattttggcacccaataagacgctggcggcacagctgtatggcgaaatgaaagaattttttcctgataatgcggtggaatatttcgtttcctactacgattattaccagccagaagcctacgtccccagttctgatacttttatcgagaaagatgcatcggtaaacgagcatatcgaacagatgcggctttcagccaccaaagccctgctggagcggcgtgatgtggtggtggtggcctcggtttctgctatctacggtttgggcgatccggatttgtatctgaaaatgatgctgcatctgaccaaaggaatgattatcgatcagcgggcgattttacgtcggctagcggagttgcaatatgcccgcaacgatcaggcgttccagcgcgggacttttcgggtgcgcggtgaagtgattgatattttccctgccgaatctgatgaattggcgctgagagtggagctatttgatgaggaagtggagcgattatcgctgtttgatcccctgacgggccagctgcatcaggaagttccgcgttttaccgtgtatccgaaaactcactatgtcacgccgcgagaacgtattttgcaagcgatggaagacattaaagtcgaactagcgcaacggcgtaaggtactactggagaacaataaactggtagaagaacagcgtttgacccagcgaacccagtttgatttggaaatgatgaatgaattgggatactgctccgggatagaaaactattcacgttacttatccgggcgcggagagggagaggcgccgccgacgctgtttgactatttgcctgccgacggtttgctgatcgtggatgaatcccatgtgactattccgcaaatcggcggtatgtacaaaggggaccgttcgcggaaagaaacgctggtggaatacggcttccgtctgccgtcggcgttagataaccgcccaatgcgctttgaagagttcgaagcgttggctccgcaaaccatctacgtttcggcaacgccgggcaaatacgagctggagaaatccggcggggaagtggttgagcaggtggtgcgtccaaccggtctattggaccctattatcgaagtacggcctgtagcaacccaggtggatgatttgctgtccgaaattcgcaagcgggcggcgattaacgaacgggtactggtcactacgctgactaaacgtatggccgaggatttgaccgattatctggtcgagcatggcgaacgggtacgttatctgcattctgatattgataccgtcgagcgggtcgaaattattcgtgacttgcgcctcggtgagtttgacgtgttggtaggcattaacttgctgcgagaaggtctggatatgccggaagtctcgctagtggcaatcttggatgcggataaagaaggcttcctgcgctctgagcgctcattgattcagaccattggccgggcggcgcgtaacctaaacggtaaagcgatcctttacggtgacaaaatcaccgcctcgatggagaaagccatcggtgaaaccgaacgtcgtcgggcgaaacagcaggcgcataacgaagccttgggcatcgttccgcagggcctgaataagaaagtcggtgatatattgcaactgggtcagccttctctacgtggcaaaggcagaggtaaaggcggtaaggcggcggcagaaagtgcggccaactatgatgcactgacgccgaaggcgctggatcgcaagattagcgaactggaagcgcaaatgtatgtccatgcgcagaaccttgaatttgagcaggcggctgaattgcgagatcaggtacataaattgcggcagcagtttatagctatttcatgatgtcgggttgttcagaaagtgagccgttagtggtggatgctataaatcgggaatttctgcttgtcgcatccgtcattcctgattaatgtgtgcggctgataaattcgtcacctaataacatgtgagatatataatgagcgaccacttgtcgaaagatcctctccacggaattacgctggagcaattattgaccaagctggtggagcattatggctgggaagaactggcctatcgcattcgcattaactgctttatcagcgatcccagcattaaatccagtttgaagtttttacgccgaaccccttgggcgcgcactaaagttgaagaactgtacattcatatgacgcaaaaaccggtgtggatgaaagacgtcaactgagcgttttttattcggttgactttagcccttcaggctcgcgaaagcgggcctgatttgttttatgctatgggagtctggttttatatataagctgaacctatgaaatagcttccatagttgtgcaatgatgtatttttatttcactgttttttcattagttttattaacagataaaagttttacttttttattttttttgtttgtttcatgttaatgatttatcctcttaagatattgtggatatttaagaaaatgcaaaaaataaaaagaatattttaccgctgtatataggcatgctttctgtggtgaattgtttattcttgaccgtaaattactttgccgatattgtcttgaaaaattaatacattatatccttaaattaaataatggctttagccgttttttttgtttttattatttagcgacgctgtgggtttatcttttattttatattgcagttatggacggttcaaatgaatggaatctataaaccccatttattattttctatttttattttaacgccagccacatcattacaggcgaaacctgttgaagatgaacaccagtcttacatggaggttacaggccagattttttcgccaggaaacatgctgcgcagctcttatcagcaggaacagggcaaactggccaaaattgccggcggaacaaatctgattacgccagaggatgaggggcgtctggggactttgcaggacgcactggattatcagccgggtttggtgatacagaatttttttggcggggtcgatcaaccgcggttgaatattcgtggctctggcgtgcaaagtgcgcctttgtcacggggtgttactttattacaggatggcctaccgttaaatgatgccgacggcggttttcatattagcctgttggagcctcgcgaaagtaaaattatcactgcgcggcgaggagcaaatgccaccagtccggtgagcaacgcgctcggcggcgaaattgattttatgtcttataccggtgccgatgaaaatgggcgggcacgctacgaatacggtagctttggtcgccacggatggcagggcgcgctgggcggtagcgaaggcaatctggacggacgtatcagcgtgagcggcgatcgttttagtggctatcggcagcattcgtcttcacggcgaaatgcggttagagccaatattggctatgaagatgagaactttgccagtcgaacttggttcagctggaccgatcttgcttttgacgtggcgggttctttgtctcaagagaaagttcagaccgatccgcgttcggtttttccaatggtatggacgcgcgatcctcaccgtaacgtcgaacaggctcgaatcgccaatcgccttagctggcggggcgaagattggaaaaatgagctgggcgtttgggcacagcacacccatgataactttgtgacgccggtggtctacgtgctcagcgctggtaacacttacggcgcgcagtggcgaaccgagctacagcggggggattgggattatcgccttggggcctcggcagaacgctccgatatggagcgagatttacggcaaaatcggcgcgggacgcccgataatttcaagttgctcggcgcgtacaccatgctggcagaaaatcagaatctggcttttggtgccggctggcagataacagagcaattacgcgttgataccgatttgaaaggtacgcattccgttcgcaatgccaaatcccgcgataagcgcaatgggctggatcaggattggtattttctctcacctaaattgggagccgtttggttcaccggcagcgatctgcgttggtttaccagcctgaactggagccatgaagcgccgagttttcgtgagattatctccaataaaggcgagctgaccctgctacgcccgcaaaaagccgtgacgtgggaagtgggaggtgaaggtgcgttaacccgcagcctaaaatgggatgtgacgctatatcgcagcctgattgacgatgagctgattaccacttatgacagcgaaggtcattcgataggcacttttaactacgcggataaaaccctccatcaaggggcagagattgggctgaaagggcatattccgatcagtgataacagtatcgaatatcgtctggcatggacttataacgattttcgtttccgtggcggagaatatagcggaaagcgaattggcggtattccgaagcaaattattgccgcagaggttttatataaatggaataactggagtattgggccaaatctgcattggttgccggaaataacgccgattgatcatcttaatcgcacggacatacaggctcgcgataaatatgcggtatggggaatgaaagtcgattatcgccatcctgacggctggtctgcttatctcagtatggataatttgaccgacaaactttatgccactgcttcggcaacggagcgagaagtaacatcgaaaaagagtaatacactatttcctggcatggggagatcaattaatggcggagttacctatagtttttagcgctaggcaacttatcacgcccatttttaatttactttattaatatttttagggcatggggtaagtgccatcacgaccttactctttattttaacggcgctatcttaacaatgagtattctaaaactcgcgattattgaataatgcatcggatgctgagatgaatataaaattgcagttgtacagtttttttattttattcggatttttatggtttccgacaatttgtttagcggaaaataatagttttattgatatgaaccaacgtgcggttagtttacttgaaccggtcaagcgtgcggtggttattccaataccggcagcgtcattactggttagccttgaccgtagcactcagcgtctggccggtattcatccttttgccaaagttgccgcgcaggaaggcatgctgagccgcatgtttcctgaaatcgatcttttacccagtgacacagttggtgcgggttttactcccaatattgaaaccttactggccgcgcagcctgatttagtctggcaatgggggcatttgggcgatgatattgttacgcctattgagctggcggggctaaaagtggcgttaattttgtatccgtatcacgacgatagccggatgcagcagtggataacactgatgggacgctccattggtcagaatgaaagggcgcagcaaataattgcctggcgtcagagaacgttagctgaagtgacacaaaaagtggcgcaaattccgcagcaacaaaaagtcagagtactttatctgtcgcgcttcctttcagaaatacacaccatcggtaaaacctcccacactaacagcgatattcagcgcgcaggtgggctgagtattactgcggattttggcggcgctcgcaccattaatcaggaacaaattatggtgtggaatccagacgttattttattgggcaattttgagcctgggcttctccctcgtcatatttatcaaagcccggccttagctgaagtggctgcagtgaaaaataagcgcgtctataaaatccctatcggcggttttatctgggatgcgcctaatcaggaaacgccgctgtattggcagtggctttccatggtgttttaccccgataagatttactggccgctgcgttcggaaattgttcgccagtatgattttctttatcgctatcagcctacagataaggagttggatagcattctgcaaatggacgctaataacgtgacgaaagaatatagccaacgtttcaaggacagagaatgaatatttccagccgtatatatggacgaaataaatttttctggttaataactccgggtctattgctggccgtcatgttgcttgcattgtgctccggacgttatccgttatccgccgggaaagtcctcgctattctggcatcatcctttatttcaacagaaagtctggcggagtttgttcaatggacacctattgaacaacgcgtggtggagtttattcgtttgccgagaatgcttattgcgttgctgaccggcgcgggtttatcggttgccggagctgcgcttcaggggatatttcgtaacccgttggtagggccgcaaattatcggcgtatcctcaggtgcggctttgggaggcgcattaggaatagttttattttcctcgctgatgatgatttccggcctggcttttattggcggctttttagctattttgctggtttattttctcagtcgcagtagcggagcctccagtattttgatgctgattctggccggcgtggtgattagcgcctttttcgccgcgttaatttctttagtgacctattttgccgatccgaataataccttgccggcgattgttttctggctgatgggaagctttgccaccgtgacataccacaagctagccttggctactttaccggtactttgcggtttagcgctgctttatgctctgcggttccgtattaacgtgctatcgctgggggatgaaaatgccgccgcgctgggcgtgccggtggagaaagtgcgttggctggtgttgatttctgttgcgctgattacttctgccaccgtagccgtggctggcactattggttgggtcggattagtggtaccgcatattgccagaatgctggctggtcctgatcatcgccagttgctgcctgcctcggcaatcattggcgcaatttatatgatggcgatcgatacgctttcccgcagcgtgagcagtgcagaaattcccttaggtatcatgactgccttgataggagcgccggtgtttgtctggctgctgcggcaaactcagcagaaaggatggactcatgattaatatcgatcggttgacgttaatccgaggagaaaaaacgctgtttgaacgactttccctccagatagagcaaggcagcgtaaccgctattctgggcgcgaatggacgagggaaaactacgcttttacgcctgatcatgggcgcgattaagcccacttcgggccagatttccgttgctgcgaatattggctatgttccgcagcaggaaaatgcggtttttccttatagtgtcagaactatggtgatgctggggcgagtgcgacacatgggctggtttgcttcgccaaaccggcgcgatagcgaagtgactcagcaatgtctggattgcttcgggctgtcgccgttggcggataaaccggtgaatcagctaagcggaggcgagcggcagttggtgagtattgctcgtgcgttggccagcgagcctgagattctgattctggatgagcctgcttcggcgctggatctggcaaatcaggacaaagtgctcagcgggctgcgggatttatccgcccgtttggagatgacggtggtgttgactactcattctccgttacacgcgctgcatattgccgatcggactttgttgctttatccgcagactgacggggaagacacgcaggtagcagagcaaacgaagggcgtcgcctttggcctaacgcgggaggtggtaacggataagaatctgacgcagctttatcagttgccggtacacgtagataagttggattttgcgggaaaaactcgggatatatttatgccgttgtttaactgatccagcgtgttctgtcggacataagcccggtaaataccgggcttgagaggtttaaccgagtttttgcagcgtttgctccaatgcctgacgcagtaattctcgatcgtgacgataaggaatatccttagcttccagcggctgctgagtcacgatacgatcttgtacaccgctagtgtctaccgttgggctaaccactaccgcatcaatcattttacgaccgattttgctttccatcatcgccagcttgtcctgtaacgtcagagcggcggcggccacgctgagttccttaccaagattaccaatgtaaatcatgctggcggagctacggcgcaacgcctgagttaaatcatccagcaacaacaacggcatcaggctggttaaaaagctgccggggccgatcaaaatcaaatcggcctgactaatggcttcaatggcttctcgcgtagcgctaacgtggggagacagcgtcatttcctgcggcatatgggtcaattggtcaatattgacctctccataaaccgggtgcccttcgtgatctaacgcctgtaaatccaccggctgctcggacatcggaatcagccaggcgtccacttttagcaggctgcgcagcagattgatggcttccatcggcctgacactcaagtgatccagcgcctttaacatcaggtttccgagattatggccggataattcaccattaccgctaaaacggtactcaaacatggcagaagcaacgctgggttcagtaatcaactggttcaggcaatttcgggtatcaccccaggcaataccgccttcagagcggcgaattcggccagtagaaccaccgttatcggtggtagtgacgattcctgtcaggcgtgatcctaatggagaaagggctgacataacccggcctaaaccgtggccaccaccgagtgcaacgactcgatccagatcggctaatgtgcgatttcgcataagtttcctatcgatttgccccaacccggtttatttatcaaccaaaggcataaaaatttgccataagttaacggatttatggcaaaaacgcgataaaagccgcagtttccgtgatattggacaagaatttatcccgcgaatgatttagccttcaaacctcgtttcatggtctgctaagtcgttgtatataaaaatatatagcgcaaagacccgattggctatcccgacgttttagcgctagaatccttgggaaaaccacggtttctcctgacagtctttgggccgtcgctgaaatcaaactcctagcctctgtgtctacgttgctcacgcaatatgatgctttggccgtggcattgagccaccagggtgcgaggtagaaatgcctgcatctcccgtatttggaaaggtgttatggtaccgcaactgaccgacgcatttgcgcgcaagttctattacttgcgcctatcgattactgacgtgtgcaattttcgttgcacctactgcttgcccgatggttatcaacccaatggggtgaaaagctttctgacgctggatgaaattcggcgcgtcagccgcgcttttgccgaattggggacggaaaaaatccgtctgaccggcggcgaaccttccatgcgacgcgattttaccgatatcattgctgctatccgtgaaaatccggcgatccgcacgctggcggtgacgaccaatggttatcgtctggctcgcgacgtggcggcgtggcgcgatgcggggctgagcgctatcaacattagtgtcgatagtctcgatccgcgccaattccatgccattaccgggcaagataaatttcatcaggtcatgcagggcattgataaagccttcgaagtcggttttgagaaagtcaaaatcaacgcggtattgatgcgtgatgtcaacgatcgcagcctgaaagcctttctggactggataaaaccgcgcccgattcaattgcgttttatcgaactgatggaaaccggtgaagggagcgagctattccgtaaacaccatgtttccggcggagtgattcgccagcagctactggagcaaggttgggtgcagcaagaccgtgcacgaagcgacggcccggcgcaggtttatcgtcacccggaatatcagggtgaggtcggcttgattatgccgtatgaaaaagatttctgtgccagctgtaaccgcctgcgcgtatcggccatcggcaatctccatttatgtttgttcggcgagcaggggattcctctgcgggatttattatccggcgatctgcaacaggacgaactgaaagaacgtattcaaagcgcgttgcaaaccaaaaaacagactcattttctgcatcaaggcaacagcggtatcacgcagaatctctcttttattggcggttaacgcgttggcgcattgcgctatatcaggagtatttatgacccaattaactcatattaacgccgccggcgaagcccatatggtggatgtttctgccaaagccgaaaccgtgcgtgaagcccgcgcggaggcgtttgtagaaatgcaggccacgacgctggcgatgattattgatggtagccaccataaaggcgatgtgttcgccacggcgcgcattgcaggtattcaggcggcgaagcgaacctgggagttgattcccctgtgtcacccattgatgctgagtaaggtggaagtcaatttgcaggctcagccagagcacaatcgagtccgaatcgaatcttgctgtcgtttgaccggtaaaaccggcgtagaaatggaagcgttgacggccgcttcggtcgccgcattaaccatctacgatatgtgtaaagcggtgcaaaaagacatgattatcggccctgtgcgtctgctggcgaaaagcggcgggaaatccggtgatttcgaggtaacagtatgattcaaattctcttttttgcgcaggtgcgcgagctgctcggcaccgagagtttacagctggtggcggaatatcctacggtggaagcgttgcgccaggctctgtgtcagcgtggtgaccgctggcaactggctttggacgaaggaaaattgctcacggcggtgaatcaatcgctggtcagttgggatcatccgctgtctgctggagatgaagtggccttcttcccgccggtaaccggaggctgaggatggaaaatactcgcattcgcgtcggcgcggagccatttaacgtcggtgatgaatatcaatggttggctcagtgtggcgaggacggcgccgtcgtgactttcaccggcaaagtgcgtaaccataatttgggcgataatgttagcgcgctgacgctagagcactatccggggatgacggaaaaagcgctgggagaaattatcgccgaagcccgtgagcgctggccgttgcagcgagtttcggtgattcatcgtgtgggatcgctgtatcctggcgaggaaattgtgttcgttggcgtgaccagtgctcaccgcagtgtggcctttgaatcagcagagttcatcatggattacctgaaaactcgcgcgccattctggaagcgcgaagcgactcccgcgggtgagcgctgggtcgaatctcgcgattctgaccatgaagcggccaaacgctggtaaactcatgtaaataatgccctaaaatgcctattttaactcctagggggcgggctgttttgtggtaatcttaggaccaggtgggccgtcaaggacggtctgtatcattgttcacatgcagaaggtaattaccatgggccactatccacgctctaatggttcgattgtcgaacgtgctaacacaggcattcaggcatatatggcgcaggtatatggctggatgacctgtggtctgttattaaccgcctttgtggcttggtatgcggcgaatacgccggctatcctccactttgttttctctagccagattacgttctttggcttgattattgctcagcttggtctggtatttgttatttccggtatggttaaccgcctgagcggcaccatggccaccagcctgtttatgctgtattcagcgcttaccggtttaacgctttccagcattttgatcatgtataccggcgcttctattgctagcacattcattatttgtgctgggatgtttggtgccatgagcatttacggttacaccaccaaacgtgatttaagcggtatgggcagcatgctgtttatggggctgatcggtatcgtgttggcctcactggttaacatatggctgaaaagcgacgcgttaatgtgggccgtgacttacatcggtgttgtggtgttcgttggcttaaccgcttacgacacgcagaaattgaaaaatatgggcgctcagttggacgctaacgataaagacggtttccgtaagtatgccatcgttggtgcgttgaccctgtatcttgatttcatcaacctgttcctgatgttactgcgtattttcggcaaccgtcgttaatttgggtgattgagggcagcgtcaaaaccattcatacgttacgctgtgattgaaagacaaaaaggccaccttatgaggtggcctttcttttgaatgacaacggcggtgatattttttcgatgattagtgttatctatcaaattgtaaatcagaatagttccgctcttttcccctcatttcaatagccacatcttgcccatcaggcaattttacgtctgaacatcccgtaagcggcgctgcccgttgtcgcggtaatcaccaataagggccacaggctgtgccagataatatcgaagctggcatccttcaggtaaatctgtttggtgatatcagtaaagtggcggataggattaatccaggtgatgttttgtagccacaccggcatattttccaccggcgatacatagccggaaagtagtatggcaggcatcataaacacgaataccccgataaatgcctgttgttgagtcgagcacagcgatgagatcagcaagccaaacccgaccagcgatagcccgtaaatcagcatggtgccgtagaatagtgccagcgacccggcaaagggaatttggtagaagaaaatgccgataaatagcacaattgaggcctgaaaagtcgcgacaatcagcgctggcaccgctttaccgataaatatctgccaggtggtaagcggtgataccaacagctgatctagcgttccctgttcccgctcacgtgctaccgacagcgaagttactatcagcacgccgatggtggtaatcatcgcaatcaatgacggaaccacaaaccatttataatccagattcgggttataccaatttcgtactaccagtgcgctgttattcggttttatctgtccctgcgtcagctcgtcctgataattttgaattatttgctgaatataattggccgctatctgggcactgttggagttacgtccgtccagaactagctgcaatggcgtggtgtgtccgttggctaaatcggcgctgaactgctcgggaaaacggatcagtaatagtgcgcgctggttatcaatcgttggttggatttcctgcgggctatggagcagcaaaacgttagagaatgccttcgccttggcgaaacgctgcgtcagttcaattgatgcttttccgctgtcttcgctataaatagcgatggtagcattagtcacttctagcgtggcggcgtaggggaacagcaccacctgtaaaataaccggcataatcaatattgcccgggtttgcggctcccgcagcaaagactgcaattctttgataatcaaagtataaagacgatgaaacatcatagctccttgctcagtcgagtcggcgttgggttttccacgccgtcaggccgataaacacaatggccgaagcgatcaggaataacaggttaatccacagcactgtgccgatatttccggctaaaaacagggtttgcaggctgctgacgaagtaacgagcggggatgatataagtcacggcccggactatcgcaggcatactatcgatctcaaaaataaaaccggacaacataattgatggcagaaatgccgcattcagcgccaccatggctgcgttaaactggttgcgagtcacggtagaaatcagcagccccatgcctaaagtgctggccagaaacaggctggtcatgacgaataaaatccacagagagccgcgataaggcaccccgaggataaataccgagaccgccatacacagcaccatggcgatcataccgaggaagtagtagggaataagcttggaaagcaatagctcgctacgcgtaacctgcgtggagagcagggcttccatggttccgcgctcccattcgcgggcaatcactagcgaggtcaaaatagccccgattaccgtcataataatggtaatcgcaccgggaataataaagtgctggctaattgccgctgggttaaaccaatagcgcaactgcacatcaatcagtggtgcgttggtttgccctagattttgcgattgttgttgctgccagatttgccaaattccttgcgcataaccttgcacaaagttggccgtattaggctcgctgccgtcggtaatcacctgaattggagacgtatctaatgggcgatccagccgttgggcaaaatcattgggaataacgatcagcccgcgaattttccctgcttgcattgcctgaatcagcgcctgacggttatcgctgatttgggcggcaatataaggcgagccggtaaaggcgttggccaaatcctgtgccggcttgctttgctgctccatcaaaatgccgacatgtagtttgctggaatccagattgataccgtagccgaatataaaaagcagcatgattgggatgacaaaagcgatcaggccactactgggatcgcgtaaaatttgtcgggtttctttgcggcacaacgctcgcaggcgtcgccaggaaaaaccggtatcctgataggtttcgctgttatctatcggagcggcagggtgctcagacatggctctgctccttatcgtagttttgtactaactcgataaatgcctgttccatggaaggattagggttatcgtcgcgggcgacctgctgtttcagctcatctggcgttccggcggcgatgattttcccacgataaaccagaccgatacgatcgcaatattctgcttcatccataaagtgcgtggtgaccatgacggtgacgcctttgtcaaccatgccattgatatgtaaccagaattcgcggcgagtcagagggtcgaccccggacgtgggttcgtccagaaacagaatgtctggttcatgcatcagtgcgcaagccagtgccaaacgctgtttaaaccctagcggcagagaatccggcgtttgattgagaatcgacgtaaagttaaaggcttcggtcatatcacggattttatcccgctgtaccttgccttgcaggccataaacaccggagaaaaacttcagattctgcgcgacggtcaggttgccatacagcgagaatttttgtgccatatagcccaaatgctggcgtgccttgcctgaactggttttcaaatccatgcccagtaccagcgctttaccttcactgggaaccaatagcccacacatcattttaaatgttgtagatttccccgccccgttagggccgagcagcccaaagatttcaccgcgttttacctgaaaatcaacgtgatctgttgcggcaaaatcgccaaattttttcgtcagcctctgagcttcaatcacggtttcagtgtgatcgccgctgaccgtcggcatgattttcgctaaagcggattcactttctggcccaccgccgagcagatcgataaaagcatcttcaaagcgcggatcggcctcttgaatctcagtggttggctggtttaactgctgcaagagctgttggcgatcggcatcgggtttaagaatcaaacggacatatttaccctgaatgactccgtcgctgaccagcggtagcgttaatgcccgctgtaaaagttttcggttagtgccgttttgcgctgacagcagaatagtgcggccgctcatacgttgggtaagatcttgaggcgcaccgctgtatagcaatttaccttcgttaagcagtagcacctcacggcactgttcggcttcatccagataggaggtactccagagaatcagcatgccgtcactggccagttcgtgcaccatgcgccacagttctcggcgggaaataggatcaacccccacgcccggttcatccagcagtaaaacctgaggttggccgaccaaagtacaggctaaaccgagtttttgcttcatccctccggacagttttccggctaatcgatcggtaaagcgcgtcagatcggtaaagctgagtagacgatcaaaagtctgacgtcgttgctcgccggtgacaccgcgcaggtcggcgtacagcgtcaggttctccatcaccgtcaaatcttcgtataacccgaatttttgcggcatataaccaagaattgaatgcaactggcgatcgtttttaattgggtccagacctaccactgaaagctggccactgccgggtttcaacagtccggctagcattctcagcagagtggttttccctgcgccatccgggcctaccaatccggtaactgcaccgctgcgtatttccgtggttaaactggccacggccggatgatccagtccagggaaggttttctctaccccatccagagtaatcaaatgctgtacttcagccatgacaatgcctctcgattaaggttgtgagaagcgaatagtcaccggcataccctgacgcaattcttcatcggcatcggtaacaataatgcgcaggcgatagaccagatcggtgcgtaaatcgggcgtttcaacggttttcggggtgaattccgcggttggagaaacgaaacctatcttaccgtgatacggcttattgggccggctgtcggtatacacttcgatttccgcgcccggtattgcctgacctaaatggcgctcatccacataggcgcgaatccagaccggagtggttaacgacagggtgaatacggtgttgctggcagacaaaatggtgcccggttcaacggcccgggtcaaaatagtcccggcagaaggtgaggttagcgtggtgtcatgcaggtttaattgagcctgcgccagttcagcttccgcctgtgcgacattggcttcagcctgagcaatttcctgcgggcgattgccgctcaggaattgggccagtttatctttggccgcttgcagcgcagcctgcgcctgattacgtgacgtacgcgcatcttccaactcgttagcggaggtggcttttcttgaccacaaaccctgctgacgttttaaatagctatcggcgtagttaaaggctgctactttttgcgccatttcggattttacctgtgcgatttcctccgctcgataaccggctttcaacagcgcgagctgcgcttgcgcgctggcaagattagccttcgcctgatttaacgcattgttatacgggccctcatccaactgaccaagacgttgacccggctggattttatcgccttcatcgacatccagtgaggccagacgaccgccgacacggaagcccagattcaccgtgcgaatatcaacgttgccatacagagtgagcgttccattttgctgttggcgatagtagctccatccatatagtgccgccgcaatgacggcgataacgacgactatcactgcaatactcttgcgattcataacattccctacctgcaaacatgtaattattgctgcgccgcctgatgccgcagcccgttgagaagaaggtcgatatgttcgataagcacctgatttattaacttattttcggcattgccaatgtcgttccaacccgcctgatagcgtatggtttcccgcgccatgcgaaatgccaatacttcgcccaataatgcatgggtatgaatgatggttttggtagcaagagcgtcagcgccaatgtaattcgccaacaataaattaagtttatggtgtagtggggcaatcgcctgttgatgaatcaatggataggcttcggtaggggaaagctgttcccgagccataattttgctcagattaatggtttccggctgagtcattaaatggctgaattgcagcacaccctgtcgcacataatgtaactgtcgttcagcgcattgctcggatggcggcgtttgcaaaaactggtcaatttcggccgccagaggcacgaaagcctgacgaataaaatccgcaatctgctgcgctaccgccagatagagtttttctttggaaccaaagtagtaggtaatagcagcaatattttggtctgctcgctgggcaatatcgcgagtggtcgctcctttcaaacccaattccccaaacagctcggtggcggcgcgcagtaactgttgccgtgcctgttcaccgcgcaacgttaccggaacgttggaatggggcatgataaagtctcccttatggatagaatgaatttacgctaaagccttatggttaggctggaaataaattaatcaatcatatgattaactttaggccataagtataggcctgtaaagatggggaataggaaaggatctttgactggcgtaaggcaatttttctacagtttttacctataaattcatctgattgtttaaatatctcatgttttcacaaaaatctgatataatccgcctcaatggtgcactgcagtttgtgccaatcctcgtggtaaagcctcatttaatacctcgtctgatcatcttcccttgaaactgcacctgactgaattgttaggatggggaagatctggagtttctcgtaatatgtcatttgatactctcggcttaaacgccgatatcctgcgtgcaattgaagagcagggctacctcgtgccgacgccaattcagcgtcaggcgatccctgtagtgctgcaaggccgtgatttaatggccagcgctcaaaccggtactggtaaaaccgctggtttcaccttgccgctgttgcaaatgctcaatgataccgcgcagccgatcaaaggccgccgtccggtacgtgccctgattttaaccccaacgcgtgaactggctgcacaaatcggcgaaaacgtcgaacagtacagcaagtaccttaaattacgttcgctggtggtctttggcggtgtgagcattaacccgcagatgatgaaattgcgcggaggcgtcgatattctggtcgctactccgggccgtttactggatctggaacatcagaacgcggttgatttgtctaaaatcgaaattttggtgctggatgaagccgaccgtatgctggatatgggctttattcacgatattcgtcgcgtgttggctaaattgcctgcaaaacgccagaacctgctgttctctgcgaccttctccgacgaaatcaaagggctggccagtaaattgctgcacaacccagcttccgttgaagtggcgcgtcgtaacactgcctctgagcaaatcacccaaagcgttcattttgtggataaaaaccgcaagcgggaactgctttctcagatgattggcagccaggattggcagcaggtattggtgttcacccgaaccaaacacggtgctaaccatttggcagaacaattgaataaagacggcattactgccgccgctattcatggtaataagagtcaaggcgctcgtactcgcgcgctggccgactttaaagacggtaaaatccgcgtattagtagcgactgatatcgccgctcgtggcttggatatcgatcagttaccgcacgttgttaactatgagctgccaaacgtaccggaagactacgtgcaccgtattggtcgtacaggccgcgcggaacgtaccggtgaagcgatctctctggtttgcgtcgatgagcataaactgctgcgtgatatcgagcgtctgctgaaacgtgaaattccacgtatcgcacttgaaggctacgagccggacccaagcatcagagctgagccgatccaaaacggtcgtcagggacgcggtgcttcccgtcctggtatgggccgtggcagtgccacccgctcacagggcggtgcagttgccggccgtggtgatagccgcggcaacagcagcaaacctcgcagtcagggtgacggtcagcgccgttcagcgccaccttcatcacgtccgggcagccgtaaaccgggcgagtaaatcgttcgagcttagggaaaaccgctcattgccgagcggttttttttgtcctaaattcggctattccgggctaaattcgcgttatttcttgtcttgtcgcaaggttcgctcgtatcattgccggtcttttttagggggtattttgatgcagatattcccaccttatttttcagcaggcaggtaatcaggtcatgcgggtacttttggcaccgatggaaggcgttctggattcactggttcgcgaattattaagcgaagtgaatgattacgatctctgtatcaccgagtttttgcgggtggtcgatcagttgctgccagccaaatccttctatcgttcatgccctgagttgcatcatcaaagccgcactccgtctggcacattagttcgtattcaattattaggccaatacccagaatggctggctgaaaatgccgcacgcgcggtcgaactcggttcctacggcgtggatctgaactgcggttgcccgtcaaagctggtcaacggtagcggcggtggggcgactttactgaaagatcctgagctgatttatcaaggggctaaagcgatgcgcgaagcggtgcccgctcatttacctgtgacggtaaaaatccgtttaggttgggactcgagcgatcgtcagttcgaaattgccgatgctgtacagcaggctggagccactgaactggcggttcatgggcgaaccaaagaagagggctatcaggccgatcgtattaactggcaggcgataggtgatatacgtcgcaggctcactattcctgttattgctaacggcgaaatctgggattacgccagcgcgcaggaatgtatcaaagtgaccggctgtgacgcggtgatgctagggcgcggcgcgttaaatgtcccgaacctgagtcgggtggtgaaatataacgaacctcgaatgccttggcccgaggtggtgaagctgctgcaaaaatatgttcatctggaaaagcagggtgacaccggtctgtaccacgtagcccgaattaagcagtggctaggatatttacgtaaagaatatgacgaagctaccgagctatttactgaaattcgcgcgctgaaaacctcgcaggacatcgcgcaagctatatgccgttaacggatttttgctaacggcataacattgacccgaacaaaacccctgctacgtgaaacgcctccttccagcaaacaatatcagatatgtaccagacagcctcgtgcaataaacggggcgagtacttctggcaattcggagaagttattccagcgtaaatccaagcgctttaactggctcaattctgagaagctttccggcagggtggaaagtttattggcgcgtaaatccagactgtgcagatttttcagtgcgccaaagttttctggtagctgggagagttgattaaagcgaaaattagcatcagttagctggggcaggacacaaaactcattaggtaaataatccagacaattatctgaaatatccagcacgtgtagttgcttcagggcggcaatttcaggagcgattgaagcaattttattcttcatcaaatgcaactcttgtatctgatgaaggtgccctatggccgaaggtatagctctaatcgcattgttatacagtcgaagctctttcaatgctgagagagaaaatatagctgagggaatttcttccagctgattatcggtcacatttagataggtcaaatgctgtagctcagccaaagttgcgggcaaatcactcagatgattatcgctgatataaagatattccagctgttttaacctcccgagttcttgagggaggttttgtatacggttatgaccgagatctaacatgcaaagcgacgataattcgccgatactggccggtatcgatggaatgttgttgcaggataaattaagtacctgcaacttctgcaatgagataatctcttcgggaaacgctgtcaggcagttattgtacaggctgagctgttgtaatcctgacattgtgcttaggttctcaggggctgaacttagctgtttgttatccagattactaacctgaatggcccgtttttccaccgtggtagcgattttcgggtgctgatgaagcatcattgtattgtgccttttctttatgctttgcctgatgtgccaagcataagcttttttgccgctagcgatgactttttcccatggtataaccatgggctgagtcagtacgtatcctttattgtgaagattgttctgcgggcgagacaaaagctaggcaccacttcatttcttttccctgccgggtaacaaaaacatagtcattcatctcggaaataggcaagcctgggaaggaacgcagaacatgctgaaaatcagcatcctgacaggaagaattcagcgaactcagaaataaaccaccggcttgggaaatctctttttctgaaatattgggggtgtagagattaggtttttcattattagaccatttttccgccataaggggacggtctggggcgtagaaagtcagccactgtgagaaatagccaccgccgacgtagcgaagtggaacttgatatttatctcgccagatttgattaatttcggcgcttagcggttggatatagttaaatttgctgcctgcgccgcgaatatctttatacaacactgtcgcgtaacccagacaaaccgcagccgcgacaattaacagagatagattgatgcctcgccaggatttcactcgttcgacattaaggaagcaaagagcgataacaggggataatacggtaaaaggctgtaaccattcggtgattcgtcccccgctgttaaacaggaaatagccgaatatcagtataagtggcggggtaaacacgaaaagaacggctttcttttcgtctgagtccggctgtaccaatgtggcattcagcattttgagtagcagaatgatgatgataatggggtagaaaaccacaagagcggaaaccagtactttactgttaagtcccgcgtttatttgtgaatcaacccaattgaaggcggcaaagtcgtgctgataaagccaaaaaatattgggggcgataataagtaaaaatagtaataacgaaagatagaactctttgctattgcaggattctcgtccttttttcgtcgagaaggcataaataagcataaacggaaaaaatgcaaagctggagtattttgacatggcggctaacccgcaaacgacagctaaggcataccagtaagctttattatcataaatagattcaacgaaaaataagaataagtacggccaaaacatcacaagtagataattgtcattataagaaattatatcaaaattgataacgccagataaatttagcgcgagcatagagaaaaatgcgattttgtaactgccaaacagtcttcggctcagaaggaaaacaccccataaaccgacggcaataacggtaaaatgcgaaacataccaatataacgcaaggtttatcagtgggttgatgagtagacctatagccgtaactgcgccaacgatatagggatttttcggtgagccaaattcgaggctattcgcccaattcagggactctacggcatcgtagggaacagccggatctagattagatgagatcgcaatccatattacgctgtaaattaatataaataatattgcgccggtcttgtagttatcgtcactgccatatgtcatttagaactaaccttactcttataattgcaaatcaatttgtcattattataattacgcgtctgtgttcaagtgctttctcctttctgtttagtgattgtttaaatgtgttttttataaatggaaatagtgacttaatttaacttagatttgtttttttgtttaatgttcatctaggaataacttaactttcaataaggctatatcttctttgctattagaataactaatggaaattaacgatattcagagaacgtttttttatgttagtcgcgcgattgtcaataatcgtaagcgacccttttaaatctttgtaacaatgatttaaagaatgtctgatgcgcagtttatatgggtaacttatactgcttggagtccaacccacgtcacctaagccaatccatatgcatgtgaaaatacgtttatcaatattaagtctgtttattttatcggctacggccttgagcgttcctgtgacgagtttcgccaccaccagtgctggcgtacaacaggcagctccgttggagttagcctctggcagcgcgatggttgtcgatttaaaaaccaacaaagttatttatagtaataatcctgaccacgtagtacccattgcctcaatcactaaactgatgaccgcgatggtggctctggatgccaaacagccgcttgatgagattatttcagttgatattcatcaaactaaagaattaaaaggtgtattttcgcgagtgagagtcaatagcgaaataaaccgtaaggacatgttattactggcattaatgtcatccgaaaatcgcgccgcggccagtttggctcaccattatcgcggtgggtatagtgcatttattgctgctatgaatgctaaagccaaatccttaggcatgacccatacccattttgtagaaccgacagggctatcaacccagaacgtttctactgcgcgcgatctcagtaagttgctgctggccagtaagcagtatccgctcattggtcagttgagtacctctactgaaaaaatggcgactttccgtaatccgaattacaccttacctttccgtaataccaatcatctggtttataacgataagtggaatattcagctgacaaaaacgggttttactaatgaggcggggcattgtctggtgatgcgcacggtcattaataatcgtccggtcgctttggtggtattagatgcttttggtaaatatacgcattttgctgatgctaaccgattacgcagttggcttgaaaccggcaaagcagcgcccattccaggtgcggctaaaagttatcgacagcaaaaagatgctcagggacgtttagcgaaagtatctgaatgatagaagattaagaggcaggaatacgcaggatgcaggtgtttaacggattaaaatgaattcgcggtaggataaccgcgaattcaaccaactttaaaaaataagcttgaagacaccggtaatagtcagcaggccgacaataaaaattatcgcgataatccataatataatcttcatttgtttcccctcaaagagagtgaaaataacgccaacccaggctggcaatgtgatctcactatagtttatctttttccatttcgcggtacttcttaccaatcatactgatttttaagacttgactgaaagatagctcaaaccttactaacgccagcacttatgttttgaggtttttcctatccctggattaaaactgttggttggatctattgcctgataaaaagcctttaattcaggtttagccaaatagagatggccaacattatgttcggcggggtattcagcgcctttcgcctgcagaatttctaacatcttatctttgatttcctgcggactctcgcctttcttgacaatataatcctgatggaaaacgtgacacataaaatgaccatagtagagttttgctaccaaacggcggtctatttcttcaggcaaggtttcaaaccactgatcgtcattgcggcgcagagcaatatccaaagccaatatatcttcgaccttatcgctatgaactgaatggtaacgaactgctgcaccggcggcggcaaaacgatgtaaaaaggccttctttccttcgtcagcggtgcaaaccagatagttaccttccgccgttgcgaaaaatcgacgtaaatgctcgttagcttccgctattccctgaccggacattttcagcatcaggtgatgttcatatttatctcggtagcttttcaggcgtttaggaagatggctaggcaaaatacggctgaagccctgcatgacacgatcggtgatattgttgatcaaaaaaggaactttattcagtcgggcatcgatctttccttttagggtaaagaaagtcggcatcttatccgtacccatagaattgatcatgataaaagtgtctttgccataaatttcggcgatatcaaaaacgtcccggtgcatatattctcctgcaaccggtaagtgtttaaaatcacgtaaaatagtacgacgtaattctgtcagcaccttggtgtcattggtgccaatataaaatacctgttgctgagactccgctgggaaagtatctaaacggacggcaaaaactgcgagctttcctgcgcagccggaggcttcaaataagcgccgtttatcagcattaaaacgcgacggcgtatcggcatccacatctcgcactcgttcaacataatcatgatccgaggctttctgctcgccatgaccaatatcttccgggccataatcggcacgggttaaacgccaaagaatatcttccggcgtgtcacccagatggataccaagatggttaactaattgaagttcgccatgctcatttatctgagcaaaaagtgccatttccgtataagccgggccacgttgtattagtgaaccgccggaattattgcaaacgccgccaataaccgaagcaccgatacaggatgagccaataacggagtggggttcgcgaccaaagggttttaagcgtttctccagttcattcaacgtactgccggggaaagcaatcacctgttcggcattattcaataactgaatctgattgagtcgcagcgtgttgataataacaatctggcgatcgtaatcatttccactgggagtggatccttccgtcaggcctgtattggctgcctgcataataatgattttatctgcggccaagcaggcttgcagtatttgccattgctgcattagcgttgcggggaaaacaacggccagagcttccccttgacccgaacggaatccggtccggtaacgtttggtttgtcgctcttttgtcagaaggtaactctcaccaacaatatttttcagttgctgcaataattcctgattgttgtcaccatcggtacgattcatttttctcacctagagtacgaacatcctgttttgctgcgaaagtaaatctgaatagcttatttgttgaaatcgatgctttctttcgttgccatgaagtaaacatgaggctgaggtttctttccctactgtggggccgagtttgtgatctatttcacacactgaaggctatttataaccatgggtgttaatcgcatcggatttgatccagcttatatcaacctgtggctaacagacttaaggcataattgagtagatataaggttttcttacgactattttcctatcagggcggattcaatgagtgagcattttgttgggaaatatgaggttgaattaaaatttcgagtacagaatatccgtaacctattgaggcgaatagaaacgcaggatgcagagatttttgctctcaataatcatgaaaaagattgttatctggatgcttgtgatggcggtcttgcacggcaaaatatcagtatgatattgcgtgaaatgaacccgtcgggtattcggctatggattgtcaaagggccgggaagcgagcgatgcgaagccagccgggtcgaggatttgggcaagatttcgagtatgctggtgactttaggctatcagccggtatttaccctggaaaagaaccgcagtatctattttatcggccaatttcacattacggtcgaccatttggagtctgtgggaaattttgctgaaattgcggtgatgacagatgatccgaatgaattggcagaattaaagctgcaatgcagtctttttgcctcaaccctaggattaaccgcagatatgctggaacctcgtacttatcggcaattactgggcttctaagatcccggcattgcagtaaggtacaaatttggcaattgaccggtgaaaataacgatataggtattctcaccggtaaacagaccattatttttttaatagagttttgagattggcaaaagggttgtgagtagcgacaccctgatctttctgcgcgtcatctccggcaataaccgtcgatccgtattgatcggcttcggtatatttagaatgctcgtgatcgtggcaaaacaggcacaacatctcccaattgctgccatcttccggattattgccgtggtcgtgatcaatgtggtgtacggtcaactcacgcagattagaatacacaaactctctggaacactttccgcaaacccacgggaagagttttagcgctttctcgcggtaaccgctttccagccgggcatagtttttagggatataagccatgggaaccttcaattctgtcgtgtgatatctgaacttattttagcgtgaaagaagattcgtcaccatgattaaggtactggataggctttcctcgtatggagttttagtaaaataacgatagattaacccactgagtcaagagccatagacacgacttgatacaagaaaattttattatatcgatttgggcgtattttatttttatcattcgatttttcatgtagcgaatgggcattaatcgagccatttttctttcatataatggttttttgagactttttccaatgatttaaacggctaagacgttttacactggtagcataattaggctaattttatctggagtaagggaataatccgcccgttgcccgataattattctttgccgataaagttgaggcgatatgaaagaatcagaagtgctggccgaagtcagtaatgaaaaccagacactggtggctgtggtgcaacaagatcagcgtgtggtttatttctatatttacccgttggagtccgttgaagatcgttttccggtgcgtgcctgctgggtaagaaatctgactgcggctccccagttagatgataacgcggctattgagcaggggcttgccccgcgtttggctgcggcctattgtcgaaatattgctggtgaagaagcattggatgcgcaatatattaagattatctggtcagaaagtgatgacggcgcagcgctgtggtatcaggggcaattattggcggtgattcccggctggagtttgtatatcgatcactctgtctgttactccgctagctgtattaaagagaatccactcactttacctttggggtctgcgtctactaatacgcaatatgctcaggcggaacgtactcgacaattttggcgagtctggcagcaggaggaaggtaatccctggcccagtatgcaagtggaatatattcgacgctatgagcaacattttggtccggcgcaaaagtattatgctattgatcagggcagatggccgccaatggcgatctctcagcatgaaaaggatggagtttattattttctgacgctgggtgtcagtattcgtccgcagccttgggttgagattttatttaatgatgatgccgggaaatatcgtcgaatagaattagcgatggcagtggatagtcaatatgtcaacgaagacaacgccgttcgcatggcgagtgctttagccggttttgcccatgttccgtggggaaaaataagctggctgggagaaggccatgcactggagtctgaagtcgcccctcagggttacgaaggctatgtattatcggccaatctatactctgagcacgtcagtctgacgttgccggagcagcagggcgatccggtaaacatttattgggccagtccgatatttaccagtgagcgggagtttgcgcattcgctaccaaacggcggctacgatttgttagcgaaaatgcgtcagcggcaggtgaatcatattttcgcgccaagagaaccggttatttaatcggtcgagtagttgtgttttagcgggataaaaaatttatttttattcttggatgaagcgtacagatttgcggatttacctaataaggtcttaacttaatactgtaatggacgctgtgaatagctaataatcactcagctgataaagcacagaccgtcaggtttattcaatatttggaggacgtatggggattctatcctggattatctttggtctcatcgccggtattctggctaagtggattatgccaggtaaagacggtggcggattctttatgaccatcattcttggtgtggtcggtgctttggtcggtggctatatcagtactttctttgggatgggcagagtagacggctttaacattggtagctttgtcgtcgcagttatcggtgccttggttgtgctgtttatctaccgtaaaattcgtagctgatttaacaagaaagactcatcttctctaaagaaaggtggcaatcacatgtcacctttctctcatcaaactatcatttctctgtaataaaaatatccgttaatggctcaaagataacctgcaatctgagagacattctatgggccaggcattacttcaatatgcgccagattatcctgatactgcaccggaaacgaaaaaaaaggttctggcggttaaaggattgatgaaagcctatgcatcgcagcataaggtgttggataacatcaattttgaactccatgctggagaatttgtagcgattattggccgctcaggcgcaggaaaatcaacgttacttcatatattgaatggcaccatttcttccagcggtggagagattcttaactatcaggagagtggggaaacgcaaaatattgcctcgctgacggccaaacaaatgcgtaaatggcgtgccaagtgtggaatgatttttcaggatttctgtctggttcctcgcctcgatgttatgaccaatgtgttactcggaagattaagtcatacctcaacgcttaaatcattttttaaaatatttgccgagcgtgaccgagccagagccgtcgagctcttgcagtggttgaatatgttgccacatgcgttgcagcgcgccgaaaatttatccggagggcaaatgcaacgcgtggctatttgtcgcgcgatgatgcaaaaccctaaaattctattggccgatgagcctgtagcctccctcgacccaaaaaataccacccgaataatgaatacgctgcaaaaaatcagtgaaaacgatattgcggtggtggtgaacttacattcggtggcattagttaaagattactgcacgcgagtgattggtattgcgcaaggaaaaattatatttgacggtcatcctgatcaactaagtgacagtattattcatgatatttacaacgatgaagcaacagatgttttgcattaatttccattaatcctctacggacataggttattttaatgaaaaaagtaatgagtgttacttcgttagtggcaggtgcgatgatggtatttaacgccacggcggcagatgcaccgaaagaaatcaatttgggtattctcggtggccaaaatgcaacacagcagattggcgataatatgtgtgtaaaagaatttttggacaaagaattaaaagtaaaaaccaatttgcataatgcttcggattattctggggtcattcaaggattactcggtggaaagattgatatggtgctgagtatgtcaccgtcatctttcgcctcggtttatattaaagaccctaaggccgtcgatttggtcggtattgtcgtcgatgataccgatcagtctcgcggctatcactctgtggtcgtggtgaaggcagacagcccttaccagaaaatggaggatttaaaggggcaagcctttggttttgccgacccggattcaacttcgggtttcctgatccctaatcagagctttaaacagaaattcggcggaacgccggacaataaatataacaatttcttctccagcgtgacgttctccggtggtcatgagcaagacatccttggcgttattaatggtcagtttgccggcgcggtaacctgggcatcaatgatcggcgattataataccggttatactagcggagctttcactcgcatgattcgtatggatcatcccgatttaatgaaacagattaggattatctggcagtctccgttaattcctaatggcccaattcttgttcgcagtgctttaccgccagcattcaaagcgcagttggttgcggctatcaaaaaactggataaagaagaccatgcctgttttatcaaagcggtagggggcaagcagcatattgaggaaacctcattgagcgaataccaaaccgtcattgatttgaagcgcgatctaactaaaggcgaccgttaagtcggttgatataatgaataggatagctcaggaacggaataccggagctatcggttttcaggcggtaagttattttgaatactgatttcaatcattattaccagcaggttcgcagtaagcaaaaacgcgaaaccttaatatggtctttagctctggttgtactctatttgggtgcaggcagtattgctgaatttaatcttcacaccgttctagtttcattcccacattttttttgactatctggctgaaacaattcctgtacttcactggccggttttatttgccgatgggcgtaccgaaggttcattggcatattggggctatcgcctgaatattcagctaccgctaatttgggagacgctacagcttgccattgccgcaaccattctctcggttattgtcgcctgtattttggcttttctggcggctaataacacccacagcccagcaccagtcagattagcgattcgtacctttgttgcatttttacgtaccatgccagaattagcttgggcagtcatgtttgttatggcttttggtattggcgcgattcccggttttttggctctggcgttacatacgataggtagcctgaccaaattattctatgagtctattgaaactgcctcaaataaacctgttcgcggtttgacagcttgtggtgctagtaaattgcaacgtatgcgttttggtctttggccgcaggtgaaacctatctttctgtcttacagctttatgcgattggaaattaattttcgccagtcaaccatactgggtttggtcggcgcgggcggaataggacaagagctaatgacgtctattaagttggatcgttatgatcaggtcagcatcacgctgttgctgattattaccgtggtttcattactagattacgcctccggaaaattacgtaaacgtgttgtggaaggagccgcttaatgatgacgaatacgctttcgccagccgatgtgatttctctgaagcagcaacatccgacccttttctcgcagcagcggcgctatcttcgcttggtcgttggcatcggcgtggccattgttttctattatattttcttctttaatttctttggtattccctggtctgccttcgttcacggcagccagcaaatagggcgctatttcctgagaatgtttgtctggcatgattttatcaactggccgtttaaatattactttggtcagatttttattactttagccattgtattcgccggtacgcttacagcgacgtttattgcgttgccactgtcctttcttgctgcccgtaatgtcatggatacgccggtattacgagttacctcttttgttgtgcgccgttttctcgatgtttttcgcggtatcgatatggcgatttgggggctgatttttgttcgtgccgtaggaatggggccgttagcgggggttctggccatttttatgcaggatatgggcttactgggtaaactctatgctgagggacacgaggcagtcgataaatcccctagccgtggattaactgcaatgggggccaacccattacaaaaacaccgctttggtattttcacccagtcgtttccaacttttctggcgcttagcctgtatcagatagagtctaatacccgttctgcggcagtgttaggttttgtcggtgctggcggtatcggtttggtttacgcagagaatatgcgtttatggaactgggatgtggtgatgtttattacgttgattatggtggttattgtgatggtgatggataaaatatctgccatgttgcgcaataaatacattattggcgaagagattagcccgtataaatcagactcaagagatctgtgcgttatcactaacgataagtaatttctgtttttataccagagcccaatcaggcgcatttttgtgtggttgggttctgatatgttattttactaatcagttgtcaatttatatttgtttttgtttaacgtttatttgtgattttgaataatgtcgttattttgtatttaataattacttgcttttttcacgattatatcaaattaaatttacattgagaaaaaaggattatctctatataatactgcccgccagacgttaaagaagcttttttgttattcttgcgacattcgcacacgtctattaaattaattggaatagggcagtaatatgatcaacaacgatgtgctccgcagtgttcgctatatgcttaatgttaacgatgctaaaatcgtagaaatcatcaagttaactgattttgaagtgaacagcgcggatgtcgttaatttccttaagaaagaagacgaagctggttaccagaattgtcctgatgaggtcatggctcattttcttaacggtctgatcttctttaagcgtggtaaggatgacaaattcccagctccgtctattgaagcacgtatcactaataatattgtgctgaaaaagctgcgcgtagccttcgagttgaaagataccgatatgcacgatatcttcacctccgttgattttccggtgtccaaacctgaattgaacgcgttgttccgtaaggacgacagcaaaaacttccgtccttgtggcgatcaggtgctgcgttacttcctgaagggcctgactctgcgggtgcgcggtcctaaaaaatagtcgttttaatatgacataatgataatggcgggcattggttcgccgttattgtatttttcactttttcactttttcactttttcactttttcactgtttaaagaataaattaatgaatgatgaattaaatggattttttatgattattattatttctaatgcggatttttattaaacttcattaaatttgatattcgtataaacgaatgttatttgctttttttcattaactaaattaattacccctgaactgttaactaaaatgtattttgatggccataatgttgaagttgatatctgcccagactttgtttgaggcgtttgttatctatccaaatccgcagtggccggatattaatccggccatttagattattaataatcgtagaggttatctggggctaacttcaatggggagaaaatctgatgcaccccattcggcccaggaaccgtcatataaagatacagaacgagcttttattgcgtgtaaccccaatgccagtaccgcagcggttacgccggaaccacagctaacaacgatcggtttttccagatcgacaccgttagattggaaaatatcccgcagaatctctggcgatttgagctggccttgctcaatcatctggccccagggaatattgatgctgccgggaatatgccctaatcgcaggccggggcgaggttccggttccgcgccagcaaaccgtggcgtcgggcgcgcgtccaggatctgcgtgtccggttcgtctatagcggcgagaacctgctcgtaatttttaacagatttctcgtttagcgtggcggtaaaccactgtggagccggattggctggcccgctttccagtggcaaaccggcttgtttccactgttcaataccgccttccagcacgcgaacgtcacgggcgccaaaagtgcgaaatgtccaccagcctcgcggggctgagaaaaggttgccatcgtcatacaacactatcgtgtgctgatcgttgatacccaatttacccattgcttcaccgaatgcttcggcgctgggcaacatgtgaggcagatcggtactgtggtcggaaacctcatcaatattaaagaaaaccgcaccggggatatggccttgctcaaactcggcttgaatatcgcgtttagggtttagccccggcggtgacagccgggcatccagaataaccacttgtttatcgtctaaatgttcagccagccagtgcgggctaaccagaaaagaagggttcatcgaaagtcacctgtccgtgggttaatgaaaatatttagcttacaactatatatctaaattgggcacagaggcttttctctcgtcactatctttccctattgcgcgttggctcgaatttttcccgttcccttggtagggattaatacgggcttatcagtagcgccgcgggggatttgtggtgaatggctatactgtatggttaggcgagtatgcatgccagccgagcgaggttgaaattcacccgtttcacgaccttggggctgactacccatcatgatgatagctgggagaagtggctaagtttgcgtaggtttaatggatagccgctgaagattaaacgaacgactaaggcaaataaagtcgacatagttattgatttgttaatagttattgggtcataaagaaccctgtaactcattaaaatccttcgatgataagaggcaaaccgatggcactaacccttacccttagacctgttatagcactggcaaccatcatgttaagcctgacgactggtctggcacaggcggcagatagcgtgcgtgtggggtctaaaatcgatactgaaggctcactgctgggcaatattattgtgcaggttctggaggccaataatattaaaaccaccaacaaatctcagttgggtacgaccaaagtggtgcgagcggcgatcagcgcgggtgaaattgatatttatcctgaatataccggcaacggtgcctttttcttctcaaatgaaaaagatccggcgtggaaaaacgctcaggccggttacgagaaagtcaaagcgctggattatgaaaaaaataagctggtctggctggatgcagcgccggcaaacaatacttggaccattgcggttcgtcaggatttagccagtcaaaataatcttaagacgctggctgatttaggcaaatggataagcgatggtggtcagttcaaactggcggcttcggcagaatttattgaacgcccagatgcgttacctgcgtttgagcaggcgtatggcttcaaattaaatcaggaccaactgctgtcgctggcgggaggcgatacggctgtcaccattaaagcggcggcggagcaaacctccggtgtgaatgcggctatggcttacggcactgacggcccagtggccgctttgggcttacaaacgctgactgaccctaaaggcgttcaaccgatttatgccccggcgccgattatccgcgaagcgacgctgaagcagcatcctgaaatttctgccgtgttgaatccggtttttgcaactcttgatggctcaaccctgcaaaaactgaatgcgcggattgccgtcgaaggacaggatgcgaagaaggttgccgcgagctatctaaaagagaaagggtttatcaaaggttaatcctcgtaatgaaatactgaccggcgacggattgcatctttagccggtcatggagactttttgtttatgttagtcaaaaaccgcgtgctgctggcgctggtgacgttgctgattttggcaggtgccgggcttccttttctcagccacgcgcagaatcggttgatttcagggcagggtattgccttcttgtctttattacatgggcctgtggggttagtgctgttgcccgttatcgctttgattgccctttctttcgtttcccctaaaccttggatttacgcggttattgtcctgatggcggagttgctgctattcggtttggtctggttggcgggatttactgcctttcagctttccggtggcgaagagagcctggttcgcacttcgctgagcggcgctttctggctaatggccggattaacctttctgattgccgtcgatagcctttccagagcaattaccagcccgctgtggcgtatgttagccagcgtgcaggtactcgcccctgtgattattctgttgtttatcggtcagttggatcaactgtcgctgatgaaggaatatgccaaccgacaggacgtcttcgctgatgccttctggcagcacctcggaattttgttggcgacagttattcctaccgttttgctgggaatcccgcttgggatgctgtgctttcgttcttatcgcctgaaaaccgctattttttccgtgctaaatatcatccagacggtgccttctattgcgttatttggtttgctgatcgcgccgctggcggggttagccgcagcctggccgtggctggcaaagctgggagtgagcgggatcggtctggctccggcaattattgcattggtactttatgccttgctgccgttggttcgcagcgtggttgccggattggaaagcgtaccggatagcgtgatggaatcggcgcggggaatggggatgaccggtagccaactgtttgttcgggtgcaaatcccgctggcgttgccgttgattctatcgggcattcgcattgtggcagtgcaaaccgtcgggttagcggtggttgcagccctgattggtgccggtggattaggcgctatcgtgtttcagggattattaagcagcgcattggatttggtgttgctgggcgttataccggtgatagtgatggccatcgttgttgattcactgtttaaatttatggtttcttttctggatgtgacccgccgatgattcatttttatcaggttagtaaatattttgccggcaaactggcggtagataatctctcactggatattgccaaaggggagtttaccgtcttgatcggcacttctggctcgggtaagtccacgacgttaaaaatgattaaccggctgatcgagcacgatgaagggcaaattcactttgccggtgaagaaattcaaaaattcaaacccgaagatttgcgccgtcggatgggctacgcgattcaatctatcggcctgtttccgcattggacggtagagcaaaatatcggcaccgttccgcaactgcttaaatggccgcgtgagaaaatccgccagcgggtcacggagttattgaatctgttgcaactggatgcggatcagttccgccaccgttatcctcatgagctttcgggtgggcaacagcagcgggttggggttgccagagcgttggctgccgacccggaagtgctgttgatggatgaacctttcggcgcgctggatccggtgactcgctcagcgttacagtttgaaattgcccgtatacaccaaatgtcaggccgaaccatagtgctggtaacccatgatattgacgaagccttgaatctggccgatcgcattgtgctattggatcaggggaaagtggtgcagcaaggcacgccaattcaaatgttgacgcagccggctaacgattttgtgcgtgatttctttggccggagcgatttggggatcaaactgttggcacttggttgggcggcgcagcgtatgagggttggggaaagcgtggcgggagagccgattttggcgtcaaccagcctgcgggaagcgctttcgctgtttgtctcacgtaaagccgatagattgcaggtgatcgatgaattatcacagcctctcggcgtgctctatttttccgatctgatcgccagtcaggagcagccatgacctcatctatttgccgttggctatggcgtagagttaccgatccattggttttggcaatattactactgctgggattggtatttggcatgccatcgctgcatggcctatttgccgcctggttccccaatctcgatcgccctatttatttacaggatacgttctggtcgttattggaagctcacgtgttgctggtgctgatttccagcctgatcgccgtgttttttggcgttgcaacaggcattgccgttacgcgtccggcagggaaggaatttcgttcggttgtagaaacggtggtggcgatagggcaaaccttcccgccggtggcagtgctagcgatagcggtgccggtgatggggtttagcgagaaaccggcaattattgcgttggtactctatgggttgctgccgatactgcaaggcacgttgacagggctggaatccgtgtctcaggccacccgtgaagtcgctcaaggcgtaggtatgagtgccaggcagattttgtggcgcgtagaattgccgctcgccgctccggttatcgtcgcggggattcgcacatcggtgatcatcaatattgggactgccgcaattgcttctacggtcggtaccaaaaccttaggttctccaatcattatcggtttaagtggttttaatactgcttatgttattcagggcgctttggttgtcgcgctgttagctatcattaccgatatgttgtttgaacgttggacgcgaaaactcgcggcctggcgcgagttacaatcggtatctccgtcgaataacccgtaattcaggcttgttatcttcagcgatacacaggagtttttggtgatcttcttaattgtattcggagtgcatcaaagtgacgctttgccattctggctgtgttgacgcaggcattgaatcgctcaggcgtgcatcagcgggccgatagcatgctttagccagaagagctattggtacattggcggcatccggactgccactagtttgctcggtaaatatatctagcgggtaattaaccttaattagacagggaattaaagcggccctaactgagccagcagcgtgagagaggctattgctgctggattttcacgtcacctctttctctgaatatacactgattaacgatatgtgaattatcgcggtcagacagggcttggcgaatttataacataaacaaaaataattaattaacggtattaatttgcttacttattaactgtagtcagttaaataaaaatcgtgtctgaaatcattaatgtctaacaccagggttgactcaaatatgatttatatcaattcgcttgattataattaatttttaatatgtttatttatacagcgtcgtttcatttattagaagaaatacagccattccctataattaaattaattgaagataactgtaaattcatgtatttacaaatacatacaaaaatatacaaacatttttttataaattacgtttcatcttacatctgattttattggttatgctcgaattacattcatattctattaatcaatggcttggctggtttataaagtcaaaaatattaattaattgtgatgagtatgttttaattcgtaatattaagtaatttattgatttaattcaattggttgtagttgactgattttctggttgattgtctattttttattaatgtttttttacgatttagataatttacgaattttttacctacctaattggttgttgcgtcatgtttttttgatcaggattaaaatttccttagaaaatttattttctttctttataaattttatcgtctatctttaaatacgcatgcggttattactcattatttcatcccattcctaggggtttgtaaggattacctatgtctacagatgatcaaaaggtgggcctcattcctgtcaccttgatggtagcaggcaatataatgggctctggcgtttttcttttacctgctaacttggcttcaacgggcggaatagctatttggggatggttggtcactattattggtgcgctagcactttcgatggtttacgcaaaaatgtcatccttagatgatagtcccggtggttcctatgcctatgcacgtcgcgcatttgggccatttttagggtatcagaccaacgtactttattggttggcctgctggattgggaatattgctatggtggtaattggggtcggttacctcagttattttttcccaatcttaaaagaacctatggtattaaccatcacttgcgtagtgatcctgtggatatttgttgggctgaatatcgtcggtcctaaaatgattacgcgggttcaggctgttgccacctcattggcattaatcccaattgttggggttgcgctgtttggctggttctggttcaaaggcgagacctacatggaggcatggaacgtcagcggactagggactttcagcgcgattcaaagcactttaaacgtgactttgtggtcatttattggggtcgaaaccgcctctgtagccgctggggtagttaaaaatcctaaacgcaacgtacctattgctaccgtcggtggcgtattgatcgccgcggtatgttacgtcctgtccagtaccgccattatggggatgatcccgaacgccgcgctgcgtgtttctgcctcgcctttcggtgatgcggctcgtttagcattgggtgataccgcgggtgccgtggtttccctgtgtgctgcagccggttgtctaggctcactggggggctggacgctggtagccggtcaaaccgccaaagcggcggcggatgacggcctgttcccgccgattttcggtaaggtcaataaagccggtacgccggtagccgggttgcttattcttggcgtattaatgactatcttccaaatcagcagcatttcgccaaacgcggcgaaagagtttggtctggtctcttctgtttcggtcatattcactttggtgccttatatctatacctgtgcggccttgctactactggggcacgggcatttgggcaaacagatcaagacctatgtcgccattaccatggttgcgtttgtgtactgtatttgggctgtggtgggctccggtgcagaagaagtgatgtggtcatttgtggtgctgatggttatcactgcgctttatacatttaactataaccgtacccacaaaaacccgttcccgctggatgctccattggataaaagcaattaattcatcaccccgcgccgaaaggggcggggaagcataaatctgatgttttggtcttataacaaggacaactacgatgattgatttaagtcgtcacaaaaaacgcaacgttttggtggtggacagtaatattctcgaagccaataccgcgaatggacgagccgttaacgaactgattgaagccctgagggacattaatttcaatgttattgccgccgcgacctttgaagacggtatcgctacggtcgcttcagactcttctttgtgttgtatttttgttgattggacatccggtggcaatgacgatgcctcccacagccaggcttccgagctactaaaagaaattcgccgccgcaataaggatgtgccggtattactgatggcagagcattcttgtattaatagccttagcctggaaaccatgcgattggtgaatgaatttgtctggatgcatgaagataccgctgaatttattgccgctcgcgcccatgcgctgatcgtaaaatattatgaacagctgctgccgccgtttaccaaagcactctttaaatataccgaagataaccctgaatactcttgggccgctcccggacatcagggcggggtagcattcagtaaaacggctgtaggccgcgaattcctcgatttcttcggtgaaaacctgttccgtaccgatacgggtatcgaacgtgaatcattgggttcgctgctggatcacagcggcccgatcaaagattcagaagcttacgccgcccgcgttttcggggcgcatatgagctattccatgctgaacgggacctctggttctaaccgtgcgattatggcggcggtagtgggagataaagaagttgctctgtgtgaccgtaactgtcacaaatccatcgagcaaggattggtcatgaccggcgcgctgccggtgttctttattcctacacgtaaccgctacggtattatcgggccgattcccaagtctcaattcaagccggagtctatccagcaaaaaattgagcaaaacccattgaaatcacaggctaacagtacaaaaccagtctatgccgtagttactaactgtacctatgacggtatgtgctacaacgctaaacaggcgcaggatctgctggcggaaagtgttgatcagattcattttgatgaagcctggtatgcttatgcccgcttcaatccaatgtatcgggatcgccacgcgatgcgcggtaatccggcggatcacgatcccgacggtccaacggtgtttgcgacccaatcaacccataaactgttggcggcgctgtctcaggcttcttatatccacgtgcgtaacggtaagaaaccgattgagcattctcgttttaacgagtcttacatgctgcaatcgaccacttctccgctgtacgccattattgccgcgaacgaagttggcgcagcgatgatggacggcgagcaaggacacgctttgacgcaggaagtgattaacgaagcggtcgattttcgtctggcgctggccagagcccatgatactttcgctaagcaaggggaatggttcttcaagccgtggaacgcaccggaaattaccgatgctaaaacgggtaagaaagtgccgtttgcgcaggcatctcgcgagcagctggcaacggacccgtcttgttgggttttgaaaccgggggaaaactggcacggctttgatcaattggaagacgattggtgcatgttggacccaattaaagccggcattatggtgccgggcatgggtgacgacggcaaaatgctggacaaagggattccagcggcggtggtaacggcctacctcggtcagaaagggattgtcccttcacggaccaccgattttatggtgctgtgcctgttctcagtcggcgtaaccaaagggaaatggggaacgttaatcaacgtattactggaattcaaacagcactacgatgacaacacgccaattgccctgtgtctgccggatttggcgaaaaactacccgcagcaatatggaaaaatggggctgaaagacctgtgtgacgacatgttcgcccacatgaaaaccagcgaaatggataaattgcaatctgaagctttcagtaacttacctaaaccggttactttgccgcgtaaagcattccaggatcatatggcaggtcggtgtgaattgctgccgattgatcaattggcgggtcgtatttcagcggttggggttattccttaccctccgggcatccctatcatcatgccgggggaaagctttggttctaacgatgagccttggctgcgctatatccagagcatcgcggaatggggtgaaaaattcccaggtttcgagaaaattctggaaggctccgagcagaaagacggtaaatactctatttgggtactgaataaataatatttgggtactgaataagtcattaccgatcgtcaaaccgcagagagaattctgtttgtggtattaaagggcaaagagcgatggacgcgcactttgcccttttggcgtttaacggtctgacaaagttaagaaatatttatgattgacagggcgttataatttggacaaaggcaatgcagacgttgttaaggaactgaaagagtaactgagggttgatctgtctattcgctgtgcccccctccgctcgcaggtggttgaatgggggaggggctaacagtctttttacagcagcgatgcatgatgaatagagtagtgattaaggctgcttttgaccggcgttagacatcccggccggcgcgatgtcacccagcggagagtgtaccgtttcggtttcctgcggcgtggttgaacgggtatacatgttcagacccgccaggaatacgccgcccagagaactcagagccatcaccgcaaacagggcgatcagtaatttcttctgcatagttatattttcactttttatcgaaacagcaggaattatagacggttcccttagcgaaacaagggcgcggcttttaacgcttaccaattaaaaacttgcccaatgttatcaatacgaccgccgagacaataaccgccagtgccagccactcggttagagacagactctcgccggcaaatccgatgcccaacaatactgccaccaccgggttaacgtaggcatagctggtcgccaccgccggagggacgtttttcagcaggaacatataagcgctaatggccagcattgagccgaatacaatcaggtacatcaatgccagaattccgctggtggtcggcggttgcgtcagtttttctccgcttaaggttgagcccagcagtaatactacgccagcaactaacatttgagccgcgccagacatcgcgcctgcgggtaatgccagtttggaactccagatcgaaccaaaggcccagctcgccgaagccagtagaatcatcagcgcgccggtaggatttcccagtaaattgctgccagtattcagcaaaatgataccaaccagtcccagcccaatgccagcccactccagtttggtattcttcatgccccacagcatactaaaacacagggtaaatagcggaacggtggcgaccataaccgccgcgataccggaaggaacgtgctgatgttcagcaatagtcaccagcccgttaccaatggctaatagcaaaattccgatggcgctggccgccagccattggcgtggtgtgggtaactgatggccgcgaatagccagaaaactgaacagaataatccccgccaccagataacgaatcccggccatcatcaacggaggccagctttctacgccaatacgaatcaccagataggtagatccccagacgaaatacagcgtgaaaagcgcaccaattaacggccacgggttacggctagtttgctttagcatgattcttcaacaggtaaggacgggaaagagtggtttagtaaacatgatctggctgatgataagcaaaggattaaatctgttttttgccccattatctatggggataaactccccgcaatcaataggtctttatctatcgtatttttggcgtcaatggattgaggatatttggacacatttaaaccaatgaaaatttttttctgatatagcatgctgaataaatcagcattttcagttattggtttggagtcccgcttgagaatattgaacattcgagggtcagtgccaggtattctggggctggcgatgacttacgggttgctaagccatagcgcagccgccagcccaccctatgcatttttatctactgaagatctccagaagaatcggcagcttattactgagcagcaggcgccggaactcactcaagaagcgtattcccagctaattcgacaggcggataaggcgttagcgcgggaaaatatgagcgtgatggataaacgcatgacgccacccagcggttctaaacatgattatctcagtctgagcgcctattggtggccggacagccagcgccctgacggtttaccctgggttcgtcaggacggcgacattaatccggccagtaaaaatgaggacagcgacggcgttcggctggcggacttcaccgcgcaggtgcaggctctgacactagcctggtatttctccggtcagcaaaaatatgcggataaagctgtcgggatgatccgagcgtggtttttggtaccggctacgcggatgaacccaaatcttaattttgctcaaggcgttcccggcgtggcagaagggagaggttctggtgtgctggacggacgttatttcgctatccgagtcgtggattcgctgatcatgctgcgtaaaaatccgagctggacggcgcaggatgaacaacaaatgcatcagtggatgacggattatttatattggttgcaaaccagcccgttgggaaaaaaagaggcggcggctaaaaacaatcacggcagttggtacaaagtgcaggttgccggaattgcctggtatttgcagcgtgacgacttggtgttggacatggccgaacagatgaagccgctgctgaattatcagttggaagccaatggcgcacagccgttggagttggctcgaacgcgttctttccattatagcgactttaatttacaggcagtgacgcaactggctacgctggcgaacaacctgcatttggatttatggcgctaccaaacgcctaacggcagcgggttactgaaagcgctggattttatggcaccttatatcgataaaaacctagattggccttatcccacgcgggatcgctttggcattcggttgatacctttattgagtcaggcggacaaagcgttgggccaacctcgttatcagcattggatcgctctgggcagtttcagccccccgacaggaaaatctgtagccaaggctcgtggggcggtgaacggggctttacgagataactggctgctccaggctcccgagacgcgttaatgttgtgtatgaatgagattaacatataaaaaagccgggaattaatcccggcgaatgacctgaaaaatacttcatataaaatgagggtaatgctttacagaagacttagaactgataaaccaaaccgacggcaacgatatcgtcattattcagtttcagtttattgtcgttgctcaactggttaattttataatctacgtaagtagacatgtttttattgaagaagtaataagcgcctacatcaatatatttaaccaaatcgacatcgcctagaccttcaatatctttaccttttgactgaacataggccagagaaggtttcagaccgaaatcgaactgatattgagccactaattcaaagttttgtgctttatttgcaaagccgctcactgatgttggggtgttattaatactggccgtaccggaaattggcgtcatattacgggtttcggcataggttgccgccagataaacgccgttatcatcatatttcagccccgtggcgaaggcttcagctttatcgcctttaccgaatgtgccagccttctgagcggttgtgcggttggaggaggtatacgcggcaccgatgctaacgcctgatccaatttcatagctggacgccagaccaaagccgtcgccgttctgtttcgaagtcccgcgggaagtatcgtcgtttttgccttgatattgcaggctaaatttcagaccgtccaccagaccgaagaaatcgctgttacgataagtggcaacgccattggtgcggccagtcatgaagttatcggtttttacatagctgtcgccaccgaattccggcagcatatcggtccacgcgccgatatcgtataacacgccgtagttacggccatagtcgaaagaacccaatccggcgtagcgcaaaccggcaaagcctaagcgggttttggtatcggcggtgccttcgctttccgcgtggttaaccgcaacatgatattcccactgaccgtagccggaaagtttgtcattaatttgggtgacgcctttaaagccaaaacgaacgtaagatttatcaccatcattacttttactgtcagaaaaataatgcaaaccttttacttttccgtataagtcgagtttattgccgtctttattataaacttccgcagcgtgtgaagtagtggcaattaaaagcgccggtattaacattgccagaatattaattttcatgtttttgccctgttttcttcattgaaagatgccaatcatcaaagtttttgctgtattcaatatctgtctgaactttctcagcgcagaatttttaccgcatctgtgtgatgtatttatgacaaagtgaatttaaggatgagataataaaaaataattgataatcagcggtgaaggcgctgaattattctacgcattcgcggtcccgaataggctgacgtgagcggcgcactgtgggacaatagggcaacattcagtttagataagatatgcatggcgttatcccccgcagtaaaagatcaaatcagccagtggtataaggcccttgggcaacagattccggactttgtttctcgcgctccgcagcgtcaaatgatagctgaagtggcgaaaacgctggccggcgatgccggacgacatttggctatcgaagccccaaccggcgtggggaagaccttgtcgtacctgattcccggtattgcgatcggccgcgcggaaaccaagccgctggtggtgagcaccgctaacgtggcgctgcaggatcagatttacagcaaggatttgccgttactgaaaaaaattattcccgatttgaaatttaccggcgcatttgggcgcggacgctatgtttgcccgcgaaatctggccgccatgtgtaccgatgtctctggccagggcgatttatcgctgtttttgggcgatgagctggcgccagccaacggcgaggagcaggcaacctgcgtgggcctgtctaaagcgttgagcagccacgtttgggatgggctgcgcgatcatcatcaacaatctatcagcgattctctgtggggcaagctcagcactgataaagccaactgcttagggcgcaactgtcattattttcgtgaatgtccgttctatattgcgcgtaaagagatcgaaaccgccgatgtggtggtagccaaccatgctttggtcatggcggcgctggaaactgaatcggtattaccgaatccaaaagaattattattggtgctagatgaggggcatcacctgccagatgtggcgcgggatgcgttggagatcgaaggtgagatcaccgccgtttttgccaatatgcagttggatatgattgcccgcctggtggatcagtgcatggtgcaatatcggccgaaaaacccgcctaaactggctaattcggaacggttaaaagatcactgcgagcagatgcgggagctgattctgaacgtagaacaacaggttagccaattgcttcctacggatagtattcaagctacttatcgttttgaaatgggcatcctgccggaaagcctgacagaaagctgcgccaaattatttaagttaaccgatgcactacgcggtttagccgagtttgttcttaatgatttaaccgaacaaaccggtaagcacgatatcgtgcggctgcatcgggcgattttacagatgagccgtaccttcggttatctggaggcaatgaccaaactgtggcgtctggccgcaatggataaagcttcaaatgcgcctatttctaaatgggttacgcgggaatatcgcgaaaatcaaactcatctgtccttccactgcgtggggattcgcgtgagtgatcagttagataaaatgctgtggcgcaaagtcccccatgtcattgtgacgtcggctacgctgcgttccctcaacagctttgctcgcctacaggaactctctggtttgagcgaaaagaccggggatcgttttgtggcgctttcctccccgtttaaccacgttgagcagggcaagctggttattcccaaaatgcgcgtcgaaccgacgatggcgaacgaagcggagcatttggccgaaatggcgcagtatttccgagccgaacaggccagcggtcgccataaaggtatgttgattttgtttagcagccatcgggcgatgcaaacctttctgagccacatcaccgatctgcgtttaatgctgctggttcaaggtgatcagccgcgctaccggttggttgaagagcatcgtaaacgggtgacaaaaggcacgcccagcgtactcatcggtttgcaatccttcgcggaaggcctggatctgaaaggggagttactgacgcaggtgcatatccataagattgcatttccgccgattgatagcccggtgattttgacggaaggagaatggctgaaatcattaaaacgctatccgtttgaagtgcaaagtttacctagcgcttcatttaacctgattcagcaggtggggcgcttgatccgcagtaatgagtgccacggcgaaattgtcatttatgatcgccgtttactgaccaaaggctacggctcacgcttattggcggcgttgcccgttttccctattgaacagccggagatgccagaggcggtagcggtgcctattgcggcgaaaaaaacctcggttaaagcagcgactacgcgaaaaaaagcccctaaacgtcgccgcacggacgttacgttgggcagctaacgacgtggtgaaaaataagcgaatggcagtgagcaattcattgccatttttatttgtagccaggcatttcaaacggtttcacgcaattctctttcacctcaaaaaaatccgtggctaagattaaattagccgcaggtcagttaactcttatttgccaactcatacgagttaagtctgggcgtacctccggcagtggcgtagttcagcttccagcccattttaagggtctatccggcgtctgaggtaagcagcatgaaacaggttatggcagagtttatcggtactttctggttagttttggggggctgcggtagtgcggtgttggcggctatgtttccagtggcgggaatcggttttctgggcgtcgcattggcgtttggtttaaccgtcgtcactatggcttatgctttgggccacgtctccggcgggcattttaatccagcggtgtcgctggggctctgggtgggtgggcgattttccggcgcgcagttgattccctatattattgcgcaggttctggggggattagccggtgccacggtattgtatcttatcgccagtggtaaggccggattcgacgtcaccgcaggctttgccagcaatggttacggcgtgcgttctccggggggctacagtttgcaatcggtgttgattgccgaagtgattctgacaatggggtttgtgatggtgattatgggcgcgacggattcccgttcacccgccgcggcagcgccgttagccataggtttatgtttaaccttaatccatttgatctctattccggtggataatacctcggttaatccagcgcgaagtactggagtggccatttttgccggtggaattgccttacagcagctttgggtattctggttagcgccgctgataggcggtgctttgggcggtggcctttaccgtgcgttgtttagccctacggcgtcgaagacctgattctaattatccgctccccgcgacgccgattgggctgcgggggcgttttcctcgcgcggccagcaacaaaatctccaaagttttaccgcttatccaaccccacaggccgccatgattgatacctgacagtaaaatggccagcacgctaatcagcaatagtagacagataatatccaatctctgctggcctgtatcaaggagcaattcgcatactttgccccgacagccggcaaagctcagtaaaatcagcgctaaattgagtaaaaatacccaacgccagcctaaggtgctaacccgtattctgcccaccaccggcccaatcgcccatcccggctcgtttacgcccaacaaagtgcctatctctggtgcgggcttgtttcgggaaaggcggccatcaggctgaccgttacgtataaagtacaacccagattgctcactgtaataagcgaaagagattcatcatccaaatgctatcggccaggccagcgcttggtaatgataagccaaacagcggcatccccagataaagtatccgatagcgagcgtagcgacccgcggtgaccataaaagcgcagagtgccatcaggaacaataaaacgcctcactgtaggttttccgtgctggcggaaaatgcctgttgaatggcgggaaccgcggtattgacgatagtcaaatcgatacaacctaaagaactggccagactgataccggtcagcatgagagcctattgtcgacgggtcagaggtaaatccgaagtgagcgctgaggacataggcataatccgggaagaagaaaccctcacggtgtagtggctagttaagtgactcagttgcgccattttttctttttatagcggaattaaattctccaatggggtatcaatcagtacagatttatttaagatgggtgatattcattgggctttgataaggagaaagtgatgatttccggcgatcgtttgcacggcatacgagcttttgtccaggcggcgcaggctggcagttttagccgtgctgcagaacagcttggtttatcccgctcagcggtgggtaaagcagtggcgcggctagaatcccgcctgtcggtgcgtttgtttcagcgcaccactcgtagcctctctctcaccgacgaagggcagattttctatgaggattgcgtaaaagcgctggatgcgctggacgccgcagagattcagttggcggcgcgagccgtggctcccagcgggcgcttgcgcgtgtcattgccgatattgttcggccagcagtgggtgatgtcgccgttgctcgaattagccgacagttttcccgcgctacagctggaaattttgttttccaatcgcacagtggattttgcggaggaaggcgtcgatctggctgtgcgtattgggcatattggtgatgttgccgggttggcggcgcgaaaactgggagaacaacagtgggtgttgtgcgccagtgctgattacttagctacctatggtcatcccacttccatttcggatttagcgcatcatcgcacgattagtttgttacgaaatggtcgcagccaaacgtggcgtttagtgaatgacgcaggcaaaaccgaatctataacgccagccagtcgtttacgattggataatatggcggcggtagccacggctgcggaagcggggcacggtatcgcactactgccgcgctggctcgtcaaccctgcgctgcaaagcggtcgattgatggaaaccttgccaggcaacactggcgccggttcaccgattaatattgtctggctaaaagggcaggtgatgcccgcgcggattcgggcggcgattgataggctggtggaggcatttacaccgcaggctccctgggagtaagtgagccggttttagccggatcaaacctgagttatgctaaacaaaatagcgagaggaagcctttgttgatggattaccgcaaaattatcaaagaagtaggacgtggcaaaaatcacgcccgcgatttggatcagcagacagcctgtgagctttatcaacgaatgctggcggggcaggtgcctgaactggagctggggggcattctgattgcttttcgtatcaaaggggaatcggaggaggaaatcctcggtttttatcaggctatgcaacagcaagtgatggcgctacaggctcctgaaggtcggccaatgccggtggtgatccccagctataacggtgcgcgtaaacaggctaatttgacaccgcttctggcgttactgttgtcgcgtttagggctgccggtggtcgtacacggcgtgaccgaagatagcactcgcgtgaccagcgctgagatttttcaggcgctaggcatgccttggtctgagacaaaagaagatgctcaaactcggttggataacggccagccggtatttattccggtatctgcattttccccagagttagattgtcagctacaaatgcgctggcgtatgggggtgcgtaatagcagccataccttggcaaaactggcgacgccatttctgcatcagcgagcgctgcgtttggccagcgtttcgcatccagaatatatgcaaaaggtcggtcgattctttcaggctattggcgcgccggcgttgctgctacagggaactgaaggggaagtttacgctaatccgctgcgctgcccaccgctccacgcgatcgttggcggtgagcaaagagtcttgctggagcgtgcagaagaaagcggcgtgcctgatctacctgtatccaaagatgcagcagaaactgcccgctggattgaacgctgtctggctggcgaggtgctggttccgttgtcgatcctcaagcagttagcctgctgtcaggttattgccgggcaggcaatatcggtagagcaggcattgcggcaatttgctgctaaataatccggttttcacagaataaactgcgcggtttccgccagtcttggtcctgattggcttcccgctggcatcaggtcggtgagggcttttagcgtgataaccctatcaatgatggaaggaatcctatgcaacaggctttgagttatttcaacgcgttgaatcaagattatctggcagtgcatcaggccaaagaagacctgttttggcagaattacatgggtttgggggatgccgacgttgggaagcaattctcggcggcggagacggcatacaaaaggtttattgcggaaagtcgccgtttaaaagagctgcgtgagctgattacggcattagaagcccagccaaaaacgccggaaaatcaggatttgcttcacgggctgcggggctggtatcgcttttttgactgtaatgccattgaagatcctcaggcgcaggctttgctagatgaaattattgccttcgagtccgatctttatcagcggcgcaaaactcaccagccaatgcattttaatgctaaaggtgaaaaagtcgcggcttccctgggcgagttgctgaccaatcaggctactaatgaaaatgaaacttaccgacaaagttctcagcaggcgctgcgcgaagtagagcaatggctgttgcacaacggcttgcctgagttgattatcttgcgtaaccgatttgctcgccagatggggtatcgtaactattttgactataaagttaataaaaccgaacagatgatgccggaacaactgtttgccattctggatacttttgaacagcaaactcgtgaagcgaaccgccgtagcctgcaacaactggcggaaaaacaaggggagtctgcattagaagcttggaatatccgttttgccagcgctggagacgtcactcgtcagctcgatccttattttccttttgccgaatcattagatcgctggatcaacagttttaagcgcctgcacattggttttcgcggcgcggagatgaatttggatttactggttcgcgctggaaaatatgaaaatggttttatgcatggcccggtgccgccatttgttcagcagggtaaatggataccggcgcggatcaattttaccagtttggcgaaacccgatcaggtgggaagtggagcttcaggtttgaatacgctgttccatgaaggcggccacgcggcgcattttgctaatattgtgcaaaatgcgccttgtttctcgcaggaatttccaccgacctcaatggcttatgcagaaactcagtcgatgttctgcgatagcctgctggacgatgcggattggttaaaacgttacgctaaaaatgctgccggtgaaccgctgccagatgaattgattcgcgacaatattgaatccaagcaaccgatgcgcgcattcaatgagcgtcatattttactggtgccttactttgagtgggctttgtatcaatgggatgacgtgcagctaacgccgcaggcaattacccagctggcgcgagatattgagcaaaagattctgggtattaacgccagcccaaggccaacgctggcgattcctcatttattatcaatggaatcggcctgctcctatcagggttatctattggcgttgatggcggtagagcaaacgcgtgccttcttcctgcaacgtgacggctatttaaccgataacccggcaattggctcggatctggcggaacattactggcgtcccggtaatagcgttagccatgatgaaaccttacggagtttgactggcgaaggatttaatcctgcttatctggcggcggcctgcaatcaaacggttgagcaagcgtgggcagccgcgcaggacgctattgccagcgcggcgcagcggccacagccagcggctgattttgatctgaatgtcagtattcgagtggtcgatggtgaacgtgtgctggctgataatcagcatggggacgaagcgatgtgtcgcgctttcgccaatgctattaatgccttgtaatcaacagaatagatcgaaaaatgcccatcagggggtgctgatggacattttcgaacggctgaggaatattagtgataaatcactgcggtgccgtgcatcaggttgttaccggttgcagaagtaatggtgaaggctttagcgccagcagcatcagctttttcagctaactgtgctttcaggctgctcaggtcagttgcgccgctaacggaaatgacgcctgctttctggtactgagccgcgtcctgtctattaacgtgttcagcggcaacgctggcaaatgaaagggtagttagagcgagaactgcaacaaagtttttgatgtttttcatgatgtaatcctatccgatttcgttagagtgaaagggcgtttcctttcgatagaagctatgttacgcctctgtgatatttatgaaaccggatagaattgagaatctaattcaatttttatgaacaaaaactaacgtgcggcgaccccctgcggacgcagcatatcaaagcgctgctcttcggtgacgccataataagcactcggcccgcctcctcgcagaataggctgcgccgccgtggtcagataggtgccgttactgtctagcaattgacgattaatatgcaccgcaatcacttctcctagcaccagccagctattggtattgctgccgtcggcggcctttaactgaatgcattgcgtgagtttacattcaaagttcaccggactttccgcgacgcgatctacggcgattaaccggctgggttgcggcgttaaaccggcaaactggaattcatcctgctcccgcgagagcggggcggagctgttattcatcgcctctgctaactggcgggtggccagattccagacgaactcgccggtttccacaatattagccacgctgtctttccaaccgttgctggaaaaaccgatgataggtggcgtatagctaaagcagttaaaaaagctgtaaggagccagattacgctggcctttggcgctaacagaggaaatccagccgataggtcgtgggccgataatggcgtttaatgggtcgtggggcaggccgtggccgctggcgggctcataatagtaatcgtcttcggtactcataacatccctacatcaggtttatcataagaagtcagcttagtggctaaacggaatttcgcgcactctcgctggaaaattaacaggttattggcggcctgttttgtcactcgcccgttttaaggcgatttatgctatcttacgcgccagaaaatgcctatcagagactgaagacgatggaaaacaaaaaaaatctttcccaaagaaaaaagcggattacatccccgaaatcgccatcgttcccgctacgattttgatgcgctttcagccagttgccctgaattaagcgcatttttggctccgaacgcttacggtgatatttccgtggattttgccgatcccgcggcggtaaaaatgttaaaccgggcgctgttaaaacatttctacggcattgaattctgggatattcctgcagattatctttgcccaccgattccagggcgtgcagattatctgcatcatttggccgatttgttggctagctgcaatggcggcgtgattcctcaggggaaaagcgtggcggtattagatgtcggcgtgggggccaactgtatttatccaattatcggtcagcgtgagtacggctggcgctttaccggtacggaaatcgatccgcatgcgctgaacgcggcgaaaatggtggtatcgatgaacccgaccctgagaaatacgctacgtctgaaattgcaaaagcagcctcaagctatcttcgaaggcgtttgggcagttaacgaacgttatgacgtcaccctgtgtaaccctccgttccacggttctgcggaagaagctgcggcgacaactcgccgtaaattgcacaaattgggcaaaggtgaagtggcggctaagccggtgcagaactttggcggcaagaatagcgaactgtggtgcgagggcggcgaagagggttttgtcactcgcatggtgcaagaaagcgtcgcgaggggcaataattgcctgtggttcacttcattggtatcgaaaaaaaccagcctaccagcgatttatcacgctttacgctacgctaaggcggtagaggttcgcactattgatatggcgcaagggcaaaaagtcagccgttttgtggcctggacatttcagactgaagagcaacaggcggcctgggtggctgaacgctggtaacgtagcctgctattcggttgaatataattggttgaaagtattgattaaaagtattaaatcaactcttggctcggcggcaacggtagcgttatctgccaaatgttgtcgggccctattttatttctgcgatctcccactttttgctttattcacccgcctttccagccatttcatcaaaagtaatcacagtctttatccggttattgtgtcgagcagttaacaatatcattactttgttctacgcttagaggataaatacccgacgggcaatatagcctgctaataatcatacaaattacaaaatttttcgttgtgactttctctgattttacagcaatgtctcattctcccagggtgaagactaaagcctgcggaggacatttttaatgttcttcgggctttggcatgttttttgtaaaaaggcatgttgataaagataaggcctcggcttattcattattcgccataaggactctcagctatgttcttaaatttacgatcttctcatgcgccctggcgttccgaattaacctcgatagatagcgcagtaccgatgattatatttaagccagatgggacggtaatacaggcaaatcagttatttctacaggcaatgggatatcagcgtgaagagataataggcaagcatcatcgaatattttgcgatcccaattatgtcgcaagcgaagcctatcaacgccactggcagatattaaatcagggaaagccgatcaccgataatattaaacgtattcgcaaagatggctcggtggtctggttgcaggggacttacacgccagtgctggataggctggggaaagtggtggagataatcaagattgccagcgatgtcaccgagcgaattttacagtctcaagagcaccaaagtctgctaaaagccctaaatcgttcaatgggcatgataactttcacgcccgcaggcattattctggatgccaacgataatctattaaatatcatcggttactctcttcgggatattcagcataaaccccatcagattctctgtaagcctgagtttgcccatagcgacgaatatcgccagcattggcagcgtttggcgcgtggcgaatttattgtcggccgctttgaacgtatgaatagccgtggagaagatgtctggctggaggccagctataacccgattatggatcacgatgggcaggtgataaaggtggttaaaattgctcaggatattactcaactgattcaacagcagcagcatgaagaagcgctgatgcgcaacgtacatcatctttcagtcaataccgataagtcagcgtccgaaggggcaaatattgtccagcaggcggtaaaaggcatgctggaagtggaatccattgcccgcgaaacttcggacgtagtcagcgacttagggcgctgttccaaggagatcggcaccattgtagagtccattcgtaagatatcctctcaaactaatttgctggcgattaatgcttccattgaggctgcccatgcgggagagcatggcaaaggattttccgtggtggccagtgaggtgcgtttgctagcggatcaatctcgtcaagctgccactgaaatcgaacatatgaccaaaacgattcagaacggagtgaccgcggcgattaaaggtatgggaacctgcgtggaacaagctggcggcggcgtggcgctcactcaggatgcgggggaagtgattaatcaggtcaatattggtatgcaggatgtggtgaagctgatggcggcgttcgcgcagataaaaaaccggcaaagttatagcggtagttaattgagaaaaattaatagcgtaaacgttaatgcgataaacggggataagaaatcgtgaaatacccagcgggagccagtagccgcccgctgggtagggttatcaggaaacgtgctgcaagaactcacgtagcctgtcgcttggcggattggagatcaacgtatcaggatcgccatcctcagccacgcggcctttatcaataaagatcaggcgtgaggccactttctgtgcaaagcccacttcgtgggtgacgatgaccatggtcatgccttcttcggccaaatctttcattacggtcaacacttcatgacgtaattccggatccagtgccgaggttggctcatcaaacagcatcagtttgggcttaaccgccagcgcgcgggcgatagccacacgctgttgctggccgccagacagttcggctgggtaatggtgcgccctctcggacaaccctacttttgccaacagggctcgcgcctgtttttctgcttcagccttactggctccacgcacccgaatcgggccaaaagccacgttttccagcgcggttaagtgagggaacagataaaactgctggaacaccattccggcttcctgacgaatcagacgctcatcgactttggggtcgttaacatccaaaccatcgacaatcagttggccttttgtgatgacttccagcttgttgatgcagcgcagcaacgtggatttacctgagcctgatggcccgataatcaccaccacttctcccttggtgatattcaaattgatatcgtgcagcacctgggtttggccaaagtgtttggagacattcttgaattcaatcatattattttcagttttctttctaaccgacgcaggacgaagctcagcgccagcgtgataatcaggtaaatcaccgcaacagccgtccagatttccatggcgcggaagttaccggcgataatctcctgaccctggcgagtcagttcggctacaccgatcacgataaacagtgaggtgtccttgatgctaacaatccattggttgcccagcggtggcaacatgcgacgcaatgccagaggggcaataacgtaacgcagggtatcgcgtttggataaacccagagccaaaccggcttcacggaaaccattgtggattgacagcactgcaccgcgggtaatttccgcgatataggcgccggagttgataatgatggtgactaccgccgccgagaaaggatcgatgcgtaccggcatcatcattggcaaagcaaaatagataaacatcacctgtacaacgataggtgtaccgcgaatcaactcaataaaaactaatgcaatatttctacttaaccaaccaccgtaagcacgggcaaaaccggctacaaccccaattatcaggccgccaagtaaacccaggaccgagatccatagggttaacttagcgccttcaagcaggattggtatggcgggccaaatagcgctccattcaaactgcatggatattctcctggtctaaaaacggcaaaaattaattacttaggttcaacaccaaaccattttttatagatttcgttgtaagtgccgttctctttcaatgttttcagtgcagcatttaccttcacgcgcaattcgctgccctgtgggaaggcgataccgtattgctgagctttgatggaatcacccaccgctttaaactggccattgccggcagttttaatgaaataaaggatgtttggcgtgtcatgcaaaactgcatccgcgcggccagtacctaattccaggtaggcgttgtcaatgttagggaactgacgcagatctttggttttgatgttggctttcgcgtaatcaacagagccggtgccgcttttcactgcaacaactttgcctttcaggtcggcttcgcctttgatgtcattattggtggtttttaccatgaccagcaggccactgttgtaataaccatcagagaaatcaacggcttttttgcgctcgtccgtaatggtgataccggctagtgccaaatcaacgttcttggtttgcaaagcaggaatgatgccgctgaaatccatgggtttcagctcataatccagattcagctctttggcaatggcggcccaaaggtcaacatcaaaaccaacgtatttatccccttgtttaaattcgaaaggaacgaaagcggtatccgtggcaacaatcagtttgtccgctgcgtgagaacttattgcaaaggccagagtgattgcggccaatgaaacttttacaagtgacttcatatgtgggagttcctttgtactttgagtggaggagatccgtttttttataattcagggagcaatatgaaaagatcgtgccaaaattgcaagtcttttaaaaataaagcaattaatctaaataattaggttgcaactacttagttactgtattttgcactgctatgggtcaccacaatggtgcgtttttaccattttggtgcaatctctccatgagtaacccatcagtaactaattagtcaataattaatgattatagtttaacagttaaataacaaaatgcgggtgagttcaggttttttatacgcaaaaaataatgatcgacatttattgatgatagaaataacgaagggttaaacagtcggtataagcgagtgagtatgagagagtataagagaagaaagagaagttagcgtaactggctgtctttactgccccggcggttatagccagcgtgatcagcctgttgtttatcgaggattttttgacaattgatacaatatcgaacgccggttagcgcttttctacgcgcctcaggaattttttcaccacattccaggcagtaacaagcactctcgcccttacccagcgcctgacgtgcccgctgaaccgcatcgtcaacggtggaatcaatctggtcttgcactgcgccgtctccggcccatccgcttgccatcgtcagtgtcctccgaaaagcataagggccagctaagccgaccctccatagtatttcatctaacaattattaattaaattattcgatattggcttcgataaaccacaggaactgatccagatcgcgagaggcggcggtaaacatatccgcagtgtcttcgtcttcgacctgagtaatcgccttacgaatatcattcgctaccaccgcatagcggtcggccagcgctttcagatgctcttgcacgctatgaatattagtcggatagcttttcaacggtgatttatcgttgacgacttggacggttcccagcgctacgccaccgagttgcaccgcgcgctctgcaaaggtatccaggtgcccggtaatggcggtacggaagccatccagcatttcatgaacggcaataaaattggcgccgcgcatgttccagtgagcctgtttggtgatcaatgacagatcgataaattgaatcagcatgtggttcagcgctttgattgcgccaatttttacgctttcatccaaatcattacgggtgtaaagcaggtcagaagatttcgtttttaccagtttagcggtactcataataggtatcctcatgctgtattggttattaatttctttaccggatcaagtatagcagggttatataatttcgttgctccaatacggcctatcaattaaattggttataacgtcagataattagtcatagaccatgattgaataagtttttggtaacgttatgatttaaaataaattagctgaagcatttattcatctgtgctcacgggcctatttgtttttggataaattcagttatttaacctgcgcgaaacaataagatgtccatatttacatgactgcggcctttaattcctgctcactaagataaagataattatttatgaaataaagctattgtaataataggctcaaacaaggggtaattgagaggttttctgggttataaatcagagcaatatacgggctgatattcatcgggagtaagcaaatgaatacctcgctgatagcggcagggttattctatctgcaaggaagaaaaacacttcaggccgtttgagcgatgataaacaggcgagggaaagccagcagcaggttgccattgctgtgtaccggataggccgccgtgatttttagcagataagcttgcaagaaatcttgccgatcggtttcattcaaagggtcaataaaaggacgtaagccggtggatcgtacccagtcaacgatcgcctgagccgaaggcatcgggtggaaatagcgagttcgccagatatccacgcgttgagcaagaggagccagcagatcgtaatattcgctggcagacaaaattttaacgcgttcagcgttacttgccgctaattgttgttgccagcggccttcagcggcgacttctcgcatggcacagtggctgtgttcgtcacggttatcgggcatttggattgccagaataccctgcggggccaaatggctcatcaattgaggaatcaaaaggcgatgattttctaaccattgcagggaggcgttggcgtaaatcacattttgcggctgaggaggttgccaatgctgaatgtccgcaggttgaaatttacagtctggcagccgcttttgcgcgctttccagcattgcttgagaattatcgattcccaccagatgggcgtgaggaaaacgctggcgcagtaattcggtggaattacccggcccacagcctaaatcgctgacaaaatcgggcgtattgattgccacgcgagccagtaaatctgtcgccggtcgggtgcgctccgcttcaaactggcggtacaaatcaggattccagtctttcatcctaaaacctcattgttgctggctgaagagctaagcgccgacattaaatattttgtaatggcccgctgtacagtaccgctccggtaggttgcccggttggagaaccgccgtgaggttccagactgattgccatcacgttgcctttggttaacgcaactttattgaaagcgacctgtgtcggcccgctagcatttaacaagccgagagagtgaggtttttcgcctgccgcaatactccacagttcaaggctatgctgctcgccgatcggtactgtgcttaatggagttaacgtcaggctgcgggtagatttatccatgctgacaatccattggccgctttgctcgctgctggccagaaccgccaccggaatgggggcctcaggctgcaccagcaggcgggggaccagcaagagtgcagctaaacagactgcgatcgcccagccgagatatgcgccacttgcgcggcgtattgaggaagtctctgctttttcggggggaggcaattggagctggagttttttccaaatccaggccggcggtgtcacgggctgtaagctattgtccatttggctaaacaggttttgccagcgagacacttcttctgccagttcgggattccgtaggatttgtcgctcaaattgaattcgagccagcccgcgcagagtgcccagcgcatattctgcggccagtgctgattgatattcgcgtctgtttttcatattcctacgcagctctttaagtgctccagcgcgcggcggatccagcttttcaccgtgccaagaggctgttgtaagtgttctgagacctcgctgtgagaaagtccctgataataagccagcataatactttgccgctgttcagcggggagatatgccatgcaatgctccaaccgcttggcttcggaactttgctgtagctgagagaccggcgagggcgcgtcatcagctaggttatcggcctcgtcttcatcccatccctgcaaacggttatcattaccgcgcatcaaatctattgcccgattacggacaatatgtgtgagccaggtaaggggagaactgaggctgggattgtaattaatcgcctgactgagcacggtaataaagcaatcgtgcaatacctcttcggctcgggcatggttacgtaacatacgtaaggcaacggcgaaaagacgtggggaagttaaccggtataatcgttcaaatgccgcttggtcgcctttgccaatcgcttccagcagttcaatttgttcagccaaagacgcttcattcatttgtaatccctaaaagcaaggtgcagtgagacactgcacccagtatagaccgcttttatttaggcattagaactgtgtcaatgacatctatcacaccatttttctgattcacatcataagtgctgatattggccagattgcctttggcatctttaatctggatattatgaggcccattattcataaaccacagaggctgaccgttgacggttttcagctcggcggtaccgccaccctctttaatttttttctcaagctgtttcatatcatatttgccggctaccacgtgataagtcagaatttgggtcagcacggctttattttccggtttgaccagattctcaacggttccggctggtaatttagcaaacgcagcatcggttggcgcaaacacggtaaagggtcctgtaccttgtagggtatccaccagaccggcagctttaacggcggccaccaaagttgtgtgatctttagaattcacggcattctcaataatgtttttactcgggagcattgcggctccccccaccatcacggtgtcggacatcgctgctgccatagatacactgctgaatactaaagaggcacagatcgcggtacggataagcgttttcataatgttaatccttattagtatggaagaggtgagtcttgcctcacatctacctatacgaatcagcctgccgttttggatgccaaaagaagtgaatataattaataaaaaacgctagtccttataaaacaaggcatagcgtgatgaataagtcttgcctaaacggtgttaaatctgagcggttggcaccggatgcagaaaacggtgcatgatgtaagcatctacgtaaccctgtttcgggtgtttaaacgcctgcggcagggttgcaataatgccgaagcccagtttttgccaaaggctgaccgccagagtattggtgctgacgacaaaattgaactgaattgcccggtaacctaggcgctgagcttgttcaatgcagtgcagccccagctgtttgccaatgcctaaacctctgacgctggcatcgaccataaaagaggcgttggcaacgtgacaacctaatcctcgttggttatcaatcagcttatacatcccgacgattttatcttcatgcagcgcgacccagcagcgcacgccgtcaccaaaccaatattcgtaagcgacccgttctggcgtgtctgcggtgaaaacgtaggtgtcttcactggcgataaccgcctgaaaaagtggccagattgcggtgaaatcttcaggtgttgccggtcttatttccatgccatcgctctcatattgattaagtcagttcttcaatcttgggtttggctttaatcgttaaagttgcaccaatagaggcggcaataatacagcccagcgctgaccattgtatcaatgtcagatattcattcaggaaaattaggccagaaacggctgccaaagctggttccagactcattaatgtgccgaaggtacgggccggaagtcgggttaacgccaccatttccagtgagtaaggcaaggcggtagagagaatggcgacggccagagcaataggcaaaatagcgggagaaaacagcgccataccgttataggctacgccaatcgggcagaaaaccagcgcggcgatcagggaaccaatagctacggtacccggcccgtggttgcccccagctttttggccggaaataatataaatcgcccagcaggcaccggcgcccaaggcgcaggcggcaccgaacagatcgatactgtctacgcttttgcccagcggcagtaagaaggctaaacctattacggccaacccaacccacagaaaatcgatggggcggcgggaagaaaacatggcaacggccagcgggccggtgaattcaagagccacggcaatacccaacggaacagttttcaaagacaggtagaacagaaaattcattccgccgagcgccaggccgtaaaccagcaacggcatgcggctaccggctgtaaagcgcatccgccagggcttaaaaatcacaaatagaataagcgtaccaatccccagccgtagggaggtaatgccctgcgcgccgactagcgggaatagactttttgccaatgaagcgccgctctggatcgagatcatggctataaccagcaggaaaacgggcagcagggggagcgataatttggactgagaggacagcgacatccgttagagcctcggaaaaagagtgaataatcagatttttgccagtgtaaatgaaatgctgccgatgtatctaataattcgcaaaagtagcggatcagagacgggaaaaaagagaaataatttaatcttgagtgttttttatgcgttttgcggctatcttttagacggcaaactaagaattgtctggaatagcgttaagtgaggaacttcacaatttcgacaaaaattcgggaaaaggcgtatacttttagcgagttacactgttcttgaaatgatttgttacaccatataaaagtttagacaacgattcaggtgcagagtttctacctaagttttgttatattttaatggtgtttttgtttaattgaaaataatttgcgtcttgaggtggttatgaaaaaaattgcatgtctttcagcagtagcagcttgtgtattggcagtgagcgcaggtagtgcatttgcaggccagagtaccgttactggcggttacgctcagagcgattaccaaggtgttgctaacaaggcttcaggtttcaacctgaaataccgctacgagtggtccgattcccaactgggcgctatcggttctttcactcacactgaaaaaagttctttcggtgacagcagcagcgtttacaacaaagcacagtacaacgcaatcactgcgggtcctgcttaccgtatcaacgattgggctagcgtttatggcgtagttggtgtgggctatggtcgtttcactgcaaacggcgcgggtaacccagaagctaaatcgggttcaagcgattacggcgtagcatacggtgctggtgttcaattgaacccaatgcagaacgtagcgctggacttctcttacgagcagagccgcatccgtagcgttgacgttggtacctggatcgctggcgttggttacactttctaagagtaatcagccggtttagtattggttcttacgaactaaatgcgaaatccaataaaaatccgcctttgggcggattttttatgctccgagtattatcagatacaaaattatgcagatagcagcctttatggaagcgcattttccaatttatagctagataattatttttttggtaaatattaaaatttatttatactgtttaattcttgtaaagaaagaattaaccatttttattcaacggatatattccctcgccctaagtaaaagtatttaattatattaattacaaaaagttgactgatattaattgttggaacgcagacgttctggtctgacaaggttattcattattgatgtgaataaataattacattatcattttccatgtcatttaattaatcacatggaatcgttaatgaaaggaatcggagcgttattactcagcttattattaaccggatgtggcgggacttggttcccggaaggccattatagtgaatctcgtgaaccgaaatttcgacttcacggtgatgagcgcacaggtgcagaacgtatggcggattgtcatcgcactaagagctgtcgcggtgatgagtggcgccaacctaacccggattatgtcggccttagcgtgacttactgataaacctgcgtcatctagtctcattgaatatcattaatgatggataatattttagtcaccgttattgatattcaacgttaaccatcccgcgttcttgccgtgcttaaataagactgactacgctgtgttatatggaaattttcaaattaatttacgatgtggaatgcgtaaatcgaccgcaccaattcaacagattttgcgatattcaatatagcgaagctgttcgcgcttctgccagtgggtttatattctagccgtttaccctggcatttctctcaattaaaaccaccttcgccgagtgacattatccggagccagtgacgctgactccgggagattgaataacttaataattgctggcagcttcttctattagtgcgatgatttcattgggatgagaggctagagacgcatggctggagtccagccgaatggtttttttcggtttcatgcgttcggtaaaccattgttgggtttccggcggaatcatatggtcctgattggatatttgataccagcttggcttagtcttccacgcgggttccgttgaagtgtcggagaagcattttcctgaggtcggcttttgtgcagcagccatgacaacggcttcggttttgtccaaatcctgacagaaactttcatggaacttatcgtattttatccataaaaagtcgtcctgatccggaaacagattagcggctccggaaggtaaatcgcgcagttggaaaatactgccgagactttcgcctttatccggtgcaaaagcggcgacgtaaaccagtcctactagattaggtaaatgtccaagctgagaaataaccatgccaccgtaggagtgaccgaccagaatggtcgggccctggagcgaggtggccaatttttcggtgcgttccacatcgtcggccagagaggtcagcgggttttgtaccgcgtacaccggatagcctttattatgtaaagtcggaataatatgacgccagtgcgaaccatcgccccaggcaccgtgtaccaacaagatattcggttttgtcgtcatgttgtgtcccattatcagagtgcactataaagtatgataatccgcggccccttgccgcaataccacacatccatcaaaagtatagtttagatatgtgactaattgatgaggcagggcaaactcgcgcatcggttttagcaatctcataactcaataaattcgacttacgagcatttaaaatcaaacgactagcattgaaaacccagtcgaaagataaataataataattataaaacaataatttaacctgtgggttaattcttaatttaattatcttattgatttgtaattattcaatgttgtgacaaactataagatataaattattaaaaactttattaattgtgctggtttcctgactattcattaatataaaacaataggttgagccaccatgactgcgctagcacaccccgttatccctcagacccaggatacccgactcgagcagcagatacttcgacgctctattttctgcactttgattattgcggggatgggaattggttttggtattttatgtgggtcgatctcgattatttttgacggcatgttttcggcgttagatgccggtatgtgcagtttatctctactggtgtcacgtttattaggacagccgaatagccgccgttttcaatacggcttctggcatgttgaacccttggtactggcatttaacggcagcctattggcctttctatgtctttacgcctttgtaaatgctatcaaaggcattacagaggggggcagggagctggaattaggctgggccattgcgtatgcgttagcggtcagtattttctgttttaccattttcctgaagcagcgccggttaaataaacaggtgaaatcagagctgattgcgttggataccaaaagctggctgatgtctgcctgcatcagttctgcgctactggtggcttttctgctgtcctggagtttggaaggcaccgcctatgagtatctgattgtttataccgatccggcggtgttggcattgttaactttgattttgattccggtgccaattaaaactgtcatatccgccgtgcgcgaagtactacaaatgacgccggatacgcttgatgcttctatcgaacgtattatggaacgcttaattctggaatacggtttcctggattattcccattatgcaacacgggtcggccgaggtttatttattgaaattcatgtggttattccggaatctatggaaaatgatggcgtacggcgttttgataaaatccgcgatgagatagctttggcgattggagaccccggaccgcatcgctggctgacaatttcatttacccgcgattctaaatggctgtaattattgtttagccttcaggcgttctccccaaaatatcaacgaatgaagaggctttattctgtcgcactatctacgggggaatggttctgccagattctattattatcccgccattggatatacatcggtgaattacgctcgattcccgcaatcaatttatattaaagattatctgatggcgctgtattgctgtttttttctaaatatttcttaaacaactggcgaaagctgagaacttttcaaaaaaggcgtgctttaatccctgcgcaataaaaatgcagtatctcgtttggcgaggctcctatacaaacacaggttactgatctgacgacatcgagagatgcccaaggttaagacaggctttatcggattaaggtttagcccaaagtaacttctgatgactctatcagatacgttgtatagtgctaaaacctggacgcggagataggcagtctgcactccctctttggttaccgcccctatgcgatcactgttgaagtcttaacagatatagggacaatcatgattaactcactatcacacaataatgctcagctcaacaccaacgccgatgtctgcgaagatgcatccgtcgcggcttatatgagcgataattttattactatttctgaaaaactgaccgctaaggaagcctgtgactatttgctttctcagcttcagacggatgaaattccttctcaattatttgtcaccagcgatgattatcacctgtgcggcgtgctgtcggtaaagaagttactgcaatccatcgagccgaacagcccggtcggcaccatgatgaaccaaacctttttccatgtttcccctgacgatgagcgtaatgatgtcgcgcatctattaaataaaggcggcgtagatgtggtgccggttttggttaatcggaatttggttggagtattgggcgaaaaagaaattgctcgtctgatcgaagatgaaaataccgaagatgcccagcgccagggtgccagtttgcctttggataagccttatttaagtaccagcccgtgggaattatggaaaaagcgctgtccgtggttgctgatgttatttgtggccgaagcttatactggtacggtaattaaagcgtttgaagaacagctggaagcagttattgcattagcattctttattccattgctgattggtaccggtggtaacagtggaacgcaaattacgtctactctgattcgcgctatggcattaggggaagtcagtctgcgtaatatcggtaatgtgatcaaaaaagaggtcacgacctcattaatgattgctgtcaccatcggtggtgctgcctggattcgcgcgtggattatgggcgtgggaatggacgttacgttagtcgttagtctggcattggtcgctattactatttggagcgcctttgtttcatccattattccgatgctgctcaaaaaagccggaatagatcctgcggtagtttcagcgccctttatcgccacttttattgatggtacggggctgattatctacttcaagatcgcgcaagttgttttgaatatataaccaaagagtgggtatgacgacggaacgctgcgcttgtatatgagtacagaaatggtcaattttctgagtaccagtgcagcgtttttaataaagatgtagccgcggataaatcaattattcgcggctaacgtaaaaagggattgaggaggtggtcatcgcaacatattgtttggtaaaaatattaaggggattattatagattagatcaaacaaaggtttgttatgaataacatgacggtatttatgtggtttcttggaattatcagcgtattgggttttgtggccatttatatgagtgcgaaatgggatgaataacagcaaagggtatgattttgcctagaagcatccttcctgcaaaaaatgtaggatgtgcaggaaggatgagcatgcttaatgattatcattgtcaatgaagtaagtgaataagtattttataaaataaagcaggtaaagctcggatttattttataaaatatacaaggaaggtggttatggtcttttatattatcggcattctttatgccacctttatgatttctgtcggtatttacgagattaatctggatacgggagaaagccaggaaactttttatcggatattactggtgttctcaggtagcataatagtcgttgcctttatatggagcctgttacatcggctgaaaggctcgaaaaaataaagagaagaggctgcgcaaaagttaatcattcgcatttctcttattaactgaattactaaagttaaagcatccggcctagggcgggagatttttttatgcccaaaatcggtcgatgtaaatccagccgtcgctaagtgagtacgacatgcaaaatgaaaaacaagacgttgccttgaagtctatggtggccagcgggttactttcggttggtaaatttgtcgtgggcatatttaccggtagtattggtttgatttctgagggaattcattctctgacggactttattgctacaactattacctggtgtgcggtgcgcgtgagcgataaacctgccgatgaagatcaccattttggtcacggaaaggtcgagaatatggcggctctgtttgagattctactgttggtaatggcggcgggctggatcgccgtcgaggcatggaaacatttctggggggaaactcagcccattatcgctgcgccagcggttattgcgacgttgcttattgcaatggtgattgatttctaccgggttcgcgcgttaagacgagttgcagcggaaacaaatagcgctgcgctagaagccggagcgttgcattttctctccgatatgatgtcatccggagtggtgttgctgggcatggtatttgttttattaggctatccaaaagccgatgcggtagcggctatggtagtcgcgctgtttattctggtgacggcaatcaaattaggaaaacgctcgtttaataccttaattgataccgcgcccgaaggaatacagcacgaaattaccggttcattgacgcgtttcccggaagtgcttggcgtagctaaatgccgggtgcgcgatgccggagctatgctatttatcgaagtgactatcgtagtatgcagaacgttatctttggaacgtatcgatcggttaaaaaggcatatttccgaacaattggtggcggattatagcgaggctgaaataaccctattggctacgccgaagaaaagaagcgatgaaaatatggcgactcatttacgggttatcgccgccaataatgacgtagccattcataatttaactttgcagcagttaactagccatacctgtattagcctggatttagaagtgccagcgcatttcagcgtgactcaggccgacgtggtggctaaagcgatgaaatcggctatccgtaacgatttgggcagagaaactgaagtcgatattcatattgaaccgcagataaactacttgctcagcacggaagatgtagcggaagaagaactgacgatgattagcgaggctttacagcgtttaacgcagcaggacagcattttgcgagggattcaggatgtcaaagcgcgaaataccgacgttggtatcgtagtcagtttcaattgtatcgtgctgccttttatttctgtgatcaaggctcacaccgccatcgataatatcgaaatgaagctgcgcgcactttatcccaccatttcccgcgttgtgggttacgttgagccgacaccggttaatcctgctccggcaataatggccaccccgatccccgtcgctcccgtgcctacgacataaagttcagcaattattgctgtgcatggctgtgtgccgatggcgcgttttacgcgattaaccgtcagacagccgatattattcatgacggtttctggacaggaaagcggtgactaaaagcgtcattctcggcgggcgatgggaaattgtgcaaacgaagggcgatactgcggccatattgtggcataatgcgcgccgaatcacatatttctaatattgatctccccctattcagtaatccaatcgagagcaagctctgtgctaagtactaacaatatcaccatgcaattcggcagtaagccgctgtttgaaaacatctctgtaaaatttggcggcggcaaccgctatggtttgatcggcgctaacggctgcggcaagtcaacctttatgaaaatcctcggtggcgatttagtaccgagcgcaggcaacgtattcctcgatccaaacgagcgtttgggtaaattgcgtcaggatcagttcgcctttgaaaacaataccgtactcgacaccgtgatcatgggtcatggcgagctgtgggaagtgaaagaagaacgcgaccgcatttacggtctggccgaaatgagcgaagaggacggctataaagtcgccgatctggaagttgcctacggtgaaatggacggttacagcgcagaagcccgagcaggtgaattattacttggcgtaggtattccggtagaacagcattatggcctgatgagcgaaatcgcaccgggctttaaactgcgtgtgctattggcgcaggcgctgttctccaacccggaaattctgctgctcgatgagccaaccaacaacctggatatcgatactatccgttggttagagcaggtgctgaacgaacgtagcagtaccatgatcattatttcccatgaccgtcacttcctgaacatggtgtgtacccacatggcggatttggactacggcgaactgcgggtttatccaggtaactacgacgaatatatgactgcggccactcaggctcgtgaacgtctgttgtctgataatgctaagaaaaaagcgcagatttccgagttgcagtctttcgttagccgctttagtgccaacgcctccaaatctaaacaggcgacttcccgtgcccgtcagattgataaaattcagttggatgaagttaaggcctcaagccgtcagaacccgttcattcgcttcgatcaggaaaagaaactgttccgtaacgcgctggaagtggaatctattactaaaggtttcgacaacggcccgttgtttaaaaatctgaagctgatggtggaagttggcgagaaggtcgcgattctgggccagaatggtattggtaaaaccactttgctgaaatgtctggttggcgagactgaactggattccggcagcgttaagtggtctgaaaatagcaaaatcggttattacgcgcaggatcatgccagcgatttcgacattgacctaacggtcttcgactggatgagtcagtggaaacaggaaaaagacgacgagcaggcggttcgcagtgttctgggtcgtttactgtttagccaggacgatatcaagaagaaagttaaggtgctgtctggtggtgagaagggcagaatgctctttggtaagctgatgatggagcgtccaaatattctgattatggatgaaccaactaaccacctggatatggaatccattgaagcgttgaatatggcgctggaaatgtatgaaggtactttgatcttcgtttcccatgaccgcgaattcgttagctcactggcgactcgtgtgattgaaatgactccaggcaaaatccacgactttaccggtaactacgaagactatctgcgtagccaaggtattcagtcttaattaatatcgattagcgctgaaattaaaaaaggctggtgcaaatgcatcagcctttttgttttctggcgtagcctaacgcttagtttttaccgcagacttcgcagtgaggtgctttcgccagcttcatggtgcggaattccagcgtcatggcgtccagcattagaagcctaccacggcgtacctcgccgtaaccgctaagcagcttaatggtttccattgcctgtaaacttcctatagtgccgaccaatggggccatgacgccggtttccacacaggtgaggggggtatcaccgaacaaacgactcaggcagcgatagcacggctcatcgtcctgataggtaaatacgctgatttgcccctccattcgaatcgccgcgccggaaaccagtggctttttctgaacaaagcacaggcggtttagttgttcgcgaattgccaggttatccgtgcaatccaggactaaatgatgatcggcgatagcggctgagagctgcgaatcatccagttggcgatccaacgtagccacgctcaaatgcggattgatttcttctaaagtcaggcgcgcagacgcgactttgctcatgccgatccggtcatcccgatgcagaatctggcgctgtaaatttgataaagacacggtatcaaaatccagcagcgttaaatgcccaacgcccgccgccgccagatattgcgcggcggcgcagcctaaaccgcctagcccgacgaccaagacgcgtgaggctttaagcttttcctgaccgtcgaaatcgaaaccgcgcaggacaatttgccggttgtagcgcagcatttcagcatctgaaagttccggcagcatatcagcctcccagcaagccgttaaatagctctatgtctacgctttctccaacggcgaccgaacctcgatcccgttctaaaacgataaagcagttgccttggctgaaggcgctgaaaacatgcgagccttgatgcccggtggagctgacctccagcttaccgtcggcaccgcgggagaaaatcccacgctggaaatccagtcgtcccggcgattttttcaatggcgtaatcgccgttgcagtcaggcgtagcggcggttgccatgaagtctgtccggccagtttagccagcagcggttgcaccagttgatagaaagtcacaacggcagaaaccgggttacctggcaggccgcagaaccaggcgttcttcagtttgccgaaagcgaaaggtttacccggtttgattgccagtttccagaagccgatgtcgcccagttcttctagcatttgtttggtgtaatccgcttcacctacggaaacaccgccgctgctgattaccaaatcagccgcttcatcagcctggcggaaggcgtggcgcaaagcttcctgatcgtctgggatcacacctaaatcgataacctgacaacccagttgttgtagcattaaatgtacggcaaaacggttggtatcgtaaatctggccttctgccagcggttggcctacggcctgtagctcgtcaccggtagaaaatatggcgactttcaactggcgcatgacctgcaatttggcaatgccgagggaagctaacaggggcagttcggctacgcccagtttgactcctgcggggaacacgctggcaccttgctggatatcttcccccgccaggcgaatattttgcccagcttttaccggggcggtgaataacacgccttgttcacttacgctggcctgctcttgcataatgaccgcgtcggcaccgctcggaaccggcgcaccggtcataatacgaatgcagctgttggcgggccattcaccgtggaatggcgacccggcaaaggctttcccagcgacggacaacgcagtttgggcattcacctcatgactgcgtacggcgtaaccgtccattgccgaattggcgaaaggaggaacgttaatgggggaagtcactgggctggcggtaatccggcctgcggcatctgtcagcggaatattttccgtctctgtgagcggagtaacctgcgacagcatttttttcagcgcctgttccagagaaattaaatccgaggtgttacagtgatccatgctggactccgtggtcaggacattccggcgggtaagtcagtcaccggcggtaaaatatccaatcaaaaagggtgagggcggctattatggcagagatcgacaagagggtgaatgaattgaccggcaaagggaccggcgacgtcacactcggagcagcgcatcaggggataaacgggagcacatatgaatagccaacagattctggatttctggtttaatgaaatagacccggcattctggtttacaaaaagcgatgatttcgatgctttgctacacaaacgttttggcgcggtctggcaggcggcgtccaagggcgaactggcggaatggcgacaaactatcgacgggcgactggcagaaattatcgttttggatcaatttagccgaaatttattccgcgatacgcccgcttctttctcctgcgatggtatggccctggtgctggcgcaagaagccattcatactggcttaaccgggcaattaacgccggaacagcgcgggttcctctatttgccgtttatgcattcggaatcacagaagatacatcagcaggctttagtgttgtataccgagcttaataatggcgaccagttggagtatgagctgcggcataaagcaattatcgaccgctttgggcgttatccacaccgtaaccatattctcgggcgagtttccagcgcggaagaacaggcgtttcttctgcagccagggtctggcttctaaaaatgccacatcagaacctggctattacgaatataagatggctaggttcttatttattttagtgatgcttaaaaagcaatttccgcagccatcctttattctcctgttctatcaggaattttttaatagaaaacacattggcgtcggagtgccaaatttggccgcgatcgctacttcagtattacagcgtttcttaaaacataccgcttcgtattcaccatgttcattgatggcatgatcaagtgcgaagaaaataaatggtgataaaaataacgttcgtcatgttagttaggtgtttatgaaggaatatttattgcgattgaaaataatgaggcgtaattcaataaaaccaataaacccgaggggctataagcaggattggccaataaaatggcaaaaataaattaatatttatcgcctaggggaagggcattgaaacgaaatataatgacagaggaggaatgattagttggggaataaaaattattccccaatggagcgacttagttatgcagatactcagcgtggaagcgcagatgatcttcaataaatgtcgctatggtgaaatagctgtgatcataaccaggctgaatgcgtagcgtgagcggccagtctttttggcgcgcgagttccgccagtttggctggttgtagctgatcggccaggaattgatcgccatcgccctgatcgaccagaatcggcagcggctggtcactgttaaacagtaaatgacaactatcatattgcagccattttgtttcatgttcaccaagatattctgtgaatgctttacgcccccacggaacctgacaaggattaacaataggagcaaaggcagatactgactgatattgctgtggattacgcaatgccagcattaaggcgccgtggccgcccattgaatgtccgctgatagattgccgttcgctaacgctaaagtgttggcgaattaacgccggtaactcttcgctgacataatcgtacatacgaaaattcgctgaccagggtttctgagtggcattcaggtagaaacctgctccctgacccaaatcgtagttttcgtcattcggtacgtcttcgccgcgaggactggtatccggcatcaccagtaccaatcccagctcggctgcaatacgctgcgcgccggctttcagagtaaagttttcgtcgttgcaagtcaggccagacagccagtacagcaccggcggcggattatcatcacgcggtggtggcagatagatgctgaatgtcatgttgcaattcaggctgcgggatatatggcgataacgctgctgccagccgccaaacatccgatgctcttcgagaagttcaattgacgtatgcatgtctgctctgcctcctggctttatttattaaagtgaatcacgctgcgaatagatttaccttcatgcattaaatcaaaggcttcgttgatttgctccagacccatagtatgagtaataaagtcgttcagctggaatttaccgtctaaatattgctgcacaatgcccggcaactgggagcgtccttttacgccgccaaacgcagagccacgccatacgcggccggtaaccagctggaatggacgggtggaaatttcttcaccggcaccggctacgccgataatcaccgattcgccccagcctttgtggcagcattccagcgccgagcgcataacattaacgttgccaatacattcgaaggagaaatctacgccgccgtcggtcagctccacgatcacgtcttgaatcggtttgtcataatcttttggattaatcaaatccgtggcgcccagtttgcgggccagatcgaatttactggtgttgagatcgataccaataatacgacctgcgccagccatctgtgcgccgataatggcggacagaccgatgccgcccaggccaaatattgccaccgtatcgcccggttgtactttagcggtgttcattaccgcacccatgccggtggtgactccacagcctagcaggcagacttcttccagcggcgcttctttattaatcttcgccagcgaaatttccggtacgacggttaattcggagaaagtcgatgtgcccatgtaatggaaaataggctgaccatttttagagaagcgggtagtaccgtctggcatcaaacccttgccctgagtagcgcgaatcgcctgacacaggttggttttgccggagcgacagaatttgcattccccacattctggggtgtacagcggaatgacgtgatcgcccacggcgacgctggtgacgccttcgcccacggcctcaacaataccgccgccttcgtggcctaaaatcgccgggaagacgccttcgggatctttgccagacagggtgtaagcgtcggtatggcaaacgccagtggcgacgatacgcaccagcacttcgcctttttgcggtggcatcaggtccacttcttcaatggatagcggctggttcggcccccatgcgacggcggcgcgggttttgatcatctccatggtgttgctcctcggtttttcacgatagtgttatgtaaattgactttttatgtatactatttgttgcgttaacgttttaagttacgggttttgcagtggtttcaatttgctcaataatcagctctttcagtgcgcgaacgttcgggctgaaggcatcttttcgccagataagccaggtggcggtatcggcaaattcagggggtaacgggtgtacccgaacccgttcgtggccgggtagtaatgccagtactgaatggggtatgagcgccagaccggcaccgctggcaacgcaggccagcatggcgtgatatgactggatttccagaatagtgccaggcagcacgccagcctgtcgaaaccatgactccagccttaaacggtaggagcaactggggcggaaggcaaatagggtttcatccacagcgtctttggcctgactgatcggcgggtgatccaggcatgagatgatcactaattgttcttcgaaagatcggcagccatgtagttcttcatggtgaactggaccatcgaccaatgccgcagccagcgtaccggcgcgtacctgttcgataatttcgccggaagtgccggtgttcagcgatagtgaaacctgagaatagcgttgatgataagcggccagtaagttgggtaaacgcgtggctgcggtgctttccatcgatcccaatggaaaattgcccgcaggctcaccggcatgggtaatacgcatggcttcttcactcaacgccagaatacggttggcgtaacagagaaaattatggcccatcggcgacaggcgcagacgctgcttttcacggataaacagatcggtacccagctcaacctcaagctggcgcaggcgggtggttagattcgacggcacgcgatgcatctgttccgccgctctggctaccgaaccggtttccgctacgcagcaaaacatgcggagttgggttaaatccattactgttctctttttgtgatgaacttcatgagtattattcattttttgtgattctaatgctgaggcatgatattagcaactttcttttaaccggcagtttgggaacaggcagaacagagtcatggcgttaagaatcgctttaagtgggtttctggcattagtggtagcaatggggattggccgatttgcttttacgccgcaggttcctctcatgatagctgaacatcagttcagcctgaccggcgcggggctggtggcggcattcaactatctgggttacctgtgtggtgcctacgatgcgatgcgagccaatcgttacgttgagcgtcgcctgtggctgggcgtatggggcgcagtgacgctgacattgctctccgccgtaatagaaggcccgtggtggcacggtgtggtgcgtttcgctatcggttgggccagcggctggtcaatggtgttggtggcagcatggactaatgagcgactggcgcactatggtcgcccggcttttagcgctgcggtgtttgccgggccgggagcgggtatttttattagcggtatactggccgttgtgattcatagctacgggttaacggcatcgcaggcttggctggtttacggtgtgttggcgctggtgctgattggcgcgatcagtatcaacttacccagagcaggggagttacatcgcccgcaggtagcggcggaaccgttgattttgacgcctgcgctgaagcgtttggtctggagctacagtctggccggtttcggttatattttgccggcgacgtttctctcacaaatggcggccgcgcgttttccagacagcctgttcgctcagtttgtctggccggtttttggtggtgcagccgtggttggtattggcttaggcattttgacgcgtcgttgtctgacgactcaaactcgtctggcattgacgctgtgggtgcaggcattaggggttctgtgcgctgaattagtgccgggcgtgagcggtttggctctcggcgcgatgttgaccggcggcggttttctctgtgtggtgcagctatctttgcagcacgggcgagagctggcaccgaatcacacgcgctacatggccggtttgctcaccacgggctatgccgttgggcaattagtcgggccaatgctgtctgcgacctccacggcgttaactcaccggctagagcctgcgctgtatgtggcggtcgtcgccctgattgtggccggggctttggtgttcaatacggcggcgcgcgccggagaaaaaacgacgggataattcggggagataaagcatctgaaaccgctgtggataagggcatattgcccttatttcatcatgatatgaaacacaatcactggataatctgcacgctctcatctagagtggggcacaaaatccggacgtgatctgcatcaatgtttattcccgccgggtgcgtaagcctgttggagagaagaatgtcatcgctaagtaaagaagcaatattggtccatgctgcattggaagcccgtggtctcgaaaccccgttacgaggacaagtgttagattctgaaacgcgcaaacagcgcattcaggagcatatgacagaaattatgcagctactgaatctcgatctgtccgatgacagtctggccgataccccaagacgcattgccaaaatgtatgtggatgagattttctctggtctggattacgccaatttccctaaaatcaccgtcattgaaaacaaaatgaaagtggatgagatggtcacggttcgggatatcactctgaccagcacttgtgaacatcattttgtcactatcgatggtaaagccaccgttgcctatattccgaaagacagcgtgatcggtttgtcgaaaatcaatcgtattgtgcaattctttgcccaacgtccgcaggtacaagaacgtttgactcagcaaattttgctggcgttgcaaactctgttaggcaccaataatgtggctgtgtccattgatgcggtgcattattgtgttaaagcacgcggtattcgtgatgcaaccagcgcgaccaccaccacctctttgggcgggctatttaaatccagccagaacacccggcaggaattcctgcgcgcggtgcgccatagcagctaattcctttattgaacgagacggcacgctaaagtgccgctaaacaggatgtcgagtatgcgtcaacggatcgcaactttggacagcgcgagagggttggccatttttggcattcttctcctcaatatcagcgcgtttggtctgcctaaggccgcctatctcaatcccgcttatctgggaatgccttcgctgtctgatgcctggacgtgggcaattctggatatttttgctcaagccaaattcttatcgatgttcgctattctattcggcgcaggtattgaattgctgttgcatcgggggaaagggtggatacaggcgcggctgtctattttgctactgctaggattaattcacggaatttttttctgggacggcgatattctgctggcctatagtctgatcggtttagtttgctggcgaatgattcgtgatgctaaaagtgctgaaagcttattaagaaccggcggagtgttgtatctgattggcgtcggcgttttgctattactcggttttatcgtcaccggcgagccagggcagttttggatgccgggaccggcggaattacagtacgaacagttctggaagctacaggggggccgtgaggcgtggataaatcgcgttgatttattgtcttccaatttgatagcaatcggcgcgcaatacggctgggaactggccggctttatgctctttggcgcaggattaatgcgcagcggctggctgcgtgggcagtttagtttgctgcactatcgcctacaggccgcgtggatgataccgctttcactggtcattcaaatcccggctatcgctctgcaatggcatctacaatgggaatatcgctggaccggatttttgctgcaagtgccgcgggaactgggcgcgccgctgcaaacgctgggttatctggcgttgtgttacggtttttggcccagtttgtcccgcctgcgtatcagtcactggttagccaacgttgggcgtatggcgctgagcaactatctgctacaaacgctgatttgtatcaccattttctaccgtttcggtctgtatcagcaattagatcgcttgcaattattagcggtggttccggctgtttggttatgtaacctattgttctctaacctatggttatcctgtttcaaacaagggccgctcgagtgggcgtggagaaggttgaccgcacaggcctgtggacaggtggcagagagcactgatagcaagaagtaatctacttgatgaataaactgaagctggttagttaaaaatttgtatgtaagcgttttctttcctgtgacgtatttcacgtagtcgcaaccctaaactggttaggataagtgccaatatcggcagtatgcagaatgaatgcgctgccttcctcaccacagggcgatgtttctatggccacagtcaattccattactattcgtgatgttgccaaactggctggcgtttctctcgctacggtatcccgagtgctgaataaaagtgcggcgatccgtccggccacgcaggccgcagtgattaaagcggtggccgagctggggtatcgccccaatgccaatgctcaggcactcgcgaaccaaagtagtgacaccattggcgtggtggtcatggatgtctccgatcccttttttggcgccttggtcaaaacggtcgataccgtagcgcaacagcatgataagtatgtattaattggtaatggctatcatcaggctgacaaagagcgccatgctatcgaagtgctgatccgccagcgctgtaatgctttggtggttcacgccaaagcgttagatgatgcggaactgatcgcttttttggatcaaattcccggaatggtattaataaatcgaatcattcccggctacgaatcacgctgcgttgggctggataacgttagcggtgcgcaaatggccagccgattactgttgaaacacggccacagacgcattggttttcttggttctaaccaccccattgacgatgtgattcagcgccagcacggctatattcaggctttggaagcagcaggggtttacccgcaggagagttggcgtacctacgctacgccggatttggccggtggagaaacggcgatgatcgatttgctgagtcgcaatctcaatttgagcgcggtttttgcctacaacgattctatggctgccggggcgctggcggttctaaaagaaaacggtatcatcgtcccggagcagttttccctagtgggttttgatgatattcctattgcgcgctataccagtccaaaactcaccacggtcctctatcctattgtttcaatggcaattttagctactgaattagccctctccggtgccagtcaatcgcgagaggataatgccagctattgcttccagccgacgttggttccgcgtcactccgttacttcctgccaaactgtggcatcgctcactagttgagtatttattattgtgtaaccgttttcaatctgtgagaaaattcacagattattaacaaagccccgtctatgctttattcgttttctctctgcctggatcgcaattttaccgctgaggtaaggcaaattaccggtaatgaccccgcagatagtgtgatgttgttttgccttcactcgcggtaagcggtgctttctcgggaaactgaccgttaagcactgatatgttcgctggtggcaggctacttacacagctttttcggagttgagtgaggtcaaggacgatagatattcagttgtcagctgctctgaccgatggtttcgattatcgctaaggcaacggtgttatcaccctgtactaccctacataaacccggagatacaaatgaataagaaggttttcactttagccactctggccgctagcatgctgtttggcgcggccgctcaagcagatacccgcattggcgtcaccatttataaatacgatgacaactttatgtcggttgtgcgtaaagccattgaaaaagaagccaaaggttcgcctgacgtcacgctgttgatgaatgattctcagaatgaccaatctaaacaaaatgaccaaatcgacgtattgctggcgaaaggcgtgaaagcgctggcaatcaacctggttgatcctgcggcggctccggtcgtgattgataaagcccgcgcaaacgatatcccgatcgtgttctacaacaaagaaccttctcgtaaggctttggatagctacgataaagcttattacgtgggtactgattctaaagaatccggtgtgattcagggcgaactgatagccaaacactggaaagcctcaccggcgtgggacctgaacaaagacggccagattcagtatgtactgctgaaaggtgagccgggccatccggatgcagaagcgcgtaccacttacgtgattaaaacgctgaatgataaagaaggcattaaaactcagcagcttcaattagataccgcgatgtgggataccgcgcaggcgaaagacaagatggatgcctggttgtctggtcctaatgccaacaaaatcgaagtggttatcgcgaacaacgatgcaatggcaatgggcgcggttgaagccttaaaggcgcacaacaaaaccaatattccagtatttggcgtagatgcattaccggaagcattggcattggttaaatccgggcaaatggccggtacagtgttgaacgacgcgaataatcaggcaaaagctacctttgatttagcaaaaaatctggccgcaggcaaagacgcgactgacggtactaaatggaaagtggaaaataaagttgtgcgaattccatacgtgggcgtagataaagacaatctggctcaatttaccaaataagtatttattacctgctgctccgtttcgctcaggggggccgggcggatcagcgggttttatcaggtatccttattttaaagcggttttgatcgccaatgatgcgaagccgttttttagccaggtgtagctatggccgatattaatacagcacagccgcgcgagtggttgctggaaatgagtaatattaataaatcatttccgggcgtaaaggcattagataacgttaatttaaaagtccgaccgcattctatccatgccttaatgggagagaacggtgccggtaaatcaacgctattaaagtgtctgtttggtatctataaaaaagactctggcagcattatcttccagggcgaagaaatagaattcaaaagctcaaaggaagctcttgagcatggcgtttcaatggtacatcaggaattaaatctggtattacaacgtacggtgatggataacatgtggctggggcgttatccaaccaaaggtatttttgtcgatcaagacaaaatgtacaaagataccaaagcgatttttgatgaattagatattgatatcgacccgcgtgataaagtggctacgctatcggtatcgcaaatgcagatggtcgaaatagccaaagctttttcctacaatgccaaaatcgttattatggatgagccaacgtcgtcactaacggaaaaagaagtgaaccatttgttcaccattatccgtaaattaaaagaccgcggctgtggcattgtttatatctctcacaagatggaagagatattccagctgtgcgatgaaattactattttacgcgatggacaatggatcgccacccagccgctggccggcctggatatggataagattatctcgatgatggtcgggcgctctctgagccagcgtttccccgatcggcaaaataaacccggcgaagttattctggaagttaaaaatctgacttcactgcgtcagccttcaattcgcgatgtgtcctttgatctgcataaaggggaaattctcggcattgccggtttagtgggggcgaaacgcacggatatcgtcgaaacgctctttggcattcgcgagaaaatcagcggaaccatcaaactacaaggtaaatccatcaataataacagtgccaacgaagcgattaatcatggctttgcgttggttacggaagagcgccgttctaccggtatctatgcgtatctggatattggtttcaactctctgatttctaatattcgtaattataaaaataaatttggtctgctggataatagccggatgaaaagcgatacccaatgggtgattgatgccatgcgggtaaaaactcccggccatagaaccagtattggctcactttccggcggaaatcagcaaaaagtgattattggccgttggttattgactcaaccagaaatattaatgttggatgaaccgacgcgcggtattgacgttggggctaaatttgagatttatcagctcattaccgaactggcgaaaaaaggaaaagggataattattatttcatccgaaatgccagagctgttagggatcaccgacagaattctggttatgagcaacggtctggttgcgggaattgtcgaaacgaagcaaacctcgcaaaacgaaatattgcgtcttgcatccttgcacctctaatctagttgaaggttcttattatgaatgcgttaaataagaaaagcttgctcacttatcttaaagagggcgggatttatgtagttttgctggtgctgctggcaattatcattttccaagacccaacttttttaagtttgatgaatttaagtaatattttaactcagtcctcagtacgtattattatcgcgttgggcgttgccgggttaattgtgactcagggtacggatttatccgccggacgacaggtcggtttggctgcggtcgttgccgcgactatgttacaagcgatggataatgtgaataaggttttccctgatttacaaaccgtacctattccattcgttattttaactgtctgtctgattggcgcaattattggtttggttaacggtattattatcgcctatttaaacgtcacgccgtttattaccactttgggcaccatgattatcgtttatggaatcaactccctgtattacgattatgtgggcgcctctccaattgccggcttcgatcctgcgttttcctcatttgctcagggattcctgcgattcggtgattttaaactctcatacattacgttttacgcattgattgctattggctttgtttgggtgctgtggaataaaactcgtttcggtaaaaatatcttcgccatcggtggtaatccagaggcggcaaaagtttctggggttaacgttccgctaaacttaatcatgatttatgcattgtccggggtgttttacgccttcggcgggatgctggaagcgggacgtatcggcagtgccaccaacaacctcggttttatgtatgaattggatgccatcgcagcctgcgtggttggcggcgtatcctttagcggcggggtaggtacggtcttcggcgtggtcaccggggttattattttcacggtcattaactacggtttgacctatatcggcgtaaacccttactggcagtacattattaagggcggaatcattatcttcgccgtggcgctggattcactgaaatatgccaagaagaaataaaggctaattgaaagacggtctcgattaagagaaaagccagtcaggagtcatccggctggcttttgtttttttatacagtttatggcgactgagattcttggttctggcgccgcgagggacgcttcggtggcttacgccacttcgattccctcgccgcattctcccgttactacctcggttgttcaacacccaggtgcggcacgctcgcggatcaggttatttctctcgcttatcagctgccagcttatgttccagttcgaccaactgttccggtgataccgcaggataaccctgagcatcatcaggcacgatatgcacagccggaataggaatcagtggcccaagaaaacgcggctcgcgcttcaaaatatagaggtcagtcaatgcacccaagcgagcaaaaatctctctgactcgcaccgaaagcatatttttcggtgaaggaaccgcatagcactgcgcctgaatccccatgtgcatggctataaacagcgcgcgttcgcagtggaaacgctgcgtgacaataataaaatcgttggtgtcgaataccttgcgggtgcgaacgatagagtccagcgtgcggaaaccggcatagtccagcacgatatccgcaggagccacgccagcggcaataagatctcgtcgcatggtcatcggctcattataactttgctgcgcattatcgccgcttaacagcaggtagtttaccttgccgctgttgtaggcgttaatcgccccttgaatacggtaaaggtaaaactgattgatgacgccggtacgataatattttgccgttcccagcaccacgccgacctgacgatgaggtaattgttgaatttcatcatagatatagggggcggttttccaactaatccaacgatcgagcacaatagccgacgccatcagcaatcctgcgatgataaataagctgaaaatcaggcgtttccacattctcgggccttggttgcgtcgatgcttggggttatctgcaaggctactttacctgatacggcggcgcaagacgtgacgagggcagttaagctgatttttgtcattaaaaagcaaggatttctctaactggatagagattaacctgcccgagggcaggttgaggtaaaactagaatgaggtacgcttgtaggttcggtactgaggctgccaataattatgttcgatagcctgcgccagcgcgttatcagaggtgacggtcgccacgccctgtaactgtgcggctttacccacctgcatcgcaatactcttggaaacagcctgaatatcatcgatattcggtagtaaagccccttcaccgtgaatagccagcggagaacagtcggccaatgcgcggctggcggccatcagcatgccatcggtaatgcgacgggcaccggatgctaatacgcccaaaccgatacccgggaagatatacgagttgttgcactgagcaatagggtaaatagtctctttgtagctgaccggcgcgaacggactcccggtggcgaccaaggctgcgccgttcgtccagttcagaatatcttccggacgcgcttctacccgtgaggttgggttcgacagcggcatcacgatagggcgcgcacagtggctgtgcatctcgcggatcaattcttcagtaaacaagcccggctggccggatacgccgattaataccgttggcttggcgtgacgaaccacgtccagcagtgagatagcatcgtttttcaaatcccagttttgcagattttcgcttttctgcaccagcttgctttggaaatccagcaggtttggcaatttatctgtcagtaaaccgaagcgatcgaccataaacacgcggctgcgagcttcttcttcacttaagccttcggacatcatctgcgcgataatctgttctgcgatcccgcagcccgcggaacctgctcccaggaaggtgacggtttgatcccgcaattgactaccggcggcacggctggcggcaatcaggctgcccagcgtcacggcggcggtgccttgaatatcatcgttaaagcagcaaagctcatcgcggtaacggtttagcagtggggtcgcgtttttctgggcaaaatcttcaaactgcaataatacgtttggccagcggcgtttgacggcctgaatgaattcatcgacaaattcgtaatattcgtcgccggaaatacgcggatgacgccagcccatatacagcggatcattcaggcgttgcgggttattggtgcccacgtccagcactaccggcagggtataagccgggctgataccgccacaagcggtgtacagagacagttttccgatgggaattcccatgccgccgatgccctgatcgcccagacctaaaatacgttcaccatcggtcacaacgatgactttaacgttttgtttggtggcgttttgcagcatatcgtcaatgcgatcgcggttcggataggaaataaacagcccgcgagctcggcgataaatatcagagaaatgctcacaggcttccccgaccgttggtgtgtaaataatgggcatcatttcgctcagatgcgcttccaacaggcggtaaaacagggtttcgttggtatcttgaatattgcgcagatagatgtgtttatcatcatcatttttgaagtcttggtactggcgatacgctcgctcagcctgttcttcaatagtttcaactgcttcaggtaacagtccatgcaggttaaagtggctgcgctcgtcgtcagtaaaggcgctgcctttattcaataagggaaattccaacagaatcggccctgcgtagggaatgtacagcgggcgtttactttcgtattcaagttccatgagttttactcttaagcgttatcggatagccgttactgactccgatcctaagagatagggaaaatatgtacagcatttgttagcaatttataacaattgccaacagaaatgagagttaaagagcaaaaatcagcgtggtagtgattttaattggcgcgaataatggcgcttattaaagcgcctgattactttaactgttaattaattacacaactcatatttattaaacattagcactcattttgcttatttatatgcgttatgggagtttgtaacagtgagttctatgcgctggccgtatgacacttccagcgtattgccatcgggatcggcaaaatacgcccaataaccgacgggttcaccggaatcttgcggtgcagatcgcagacaaccctctgcgctagccagagcaaccaattcatcgactcgtgctcgactcgcgcaggcaacgccgaggtgtccgaaaggccctaacgctgtgtcttttagctccggagattgcactagaacgatagcaaaggggcgactgtgatcggtcatccatgctacttccataccgggtttgcctcctgcccgacggtgaaccagggtcattccggcgtagcgctgatagaaatccagactgatatcaatatcttgcaccactaatgcaatgtggcttagccctaaatcgagcgaatgattggtatcgattacagtggttgtcataagtatttctccggttaataacttgaggttctcttcaccggtcaaatgattcattattcactcaatgattgataatcgatattttatctagtgagtattcattacatgaataatttgcgtgccatagatcttaacctgctggttatattggatgttttgctcattgaacggcacgtatcccgagcggctacgcggttgcacatgagccaaccagcagtgagccacgcgctgaatcggctacgttatttgctggatgatccgttgctggtgcgtgcgcccggtggttttcagcttacccgtcgggcgcttgagttagttgaacctttgcagcaggtcctggagcaggttcgacaattggtaggttctgctcaatttgttccagcgcaggctagccaaagctttcgcatggcgttatctgattatggtgcagccattgtgctgccggggttgcttcagcggttacgccagcaggctccgggcatcgatctggtggtggtgcagctcagcagggagcagatggttgagcaagtgcttgcggggcagttagatctggcgctgggtgtgtttccccatttgcccgctgggttaagcagttgcaggctatttgaagaacattttgtctgtgttgctgatgcgaatcatccattggggaatgaaaagcgcctaacgctagatgattatctggctcagccgcatttgctggtttctatgcgtggcgaaagtgcgggagaagtggaggcggcactgacggaattgggccttcgacgacggattgccgcaattatgccgcactttctggtggcaccgcaggcggtggtggggacggatttacttttgacgatcgccagccgggtcgtagcgactcagccagaatcaatgaggctacaacgccttgagctgccttttgtcgtaccgagctttgattttgtgcaaatctggcatccacgtaatagtcacaaggaagatcagcgttggctgcggcagcaggtggtggaaagtctctgaaaacgagcgccccggcgaggaaagaaaaatccggggcggttaaagcggttagaaagtcgcgcggcgaacgtccgtgcagccgatagccgccagcgtggcctgagttgcatcccactggcttaataccggcgttgcaggttcagccagaaccgcgcggcgcacagtcagacaatcgctaccggacatattcatcagaatcagcgaggcctgaagtggaggcaagcttgggttaaaagcggcattttccgcatagcgtccggcgaaaattgccccctttgtatcttccagagcgacgccgctgtgcgcctggctataaggtgcatggctgcggttagcggcctccagagcggcctgagccaaagcgtcgctatcattaaggtgataaccgtgatcgaccgaatccatcaataatgtgctgatttccagatcgttagggccaaatgaatcaggcagatagtcaccaagcgttgccgctggacgacctggtagatggatatgtaaaccggtgccgctgtttaattcattcataaactgacgacaatgaccgcacggagtgtaatttacggtaatggagactaaaccgccttctccccgcagccaggcgtgggtaacggcacactgttcggcgtgaatggtttgttgcagcggtgcgccgttgaattccatattggcaccgaaatacagattgccgcttttaccgcgagcgattgcccctactttaaaatgggatatcggcgtgagtgagcaggcggcagccagcggtaacagggcgaatgccagttctgcatcattcagcccactgagagtttttaccgtttcgacttctgcggcggtaagcattgcagggaaatgatcgttgctcagcagtggctccagggcggattgcaatgctgttggcagctctgccagtggggcgcgaaaacgtgcttgcatagaaattctctccaatattaacgggaaactattttaggcagcttgcgcactcttaattgtgatgtagatctcgttgtatatgaaatttatgcaatgaatatattaaatgagagatttatctcaaatttatatgcttaaaattgcttatttggtgttcattgcgcttatttagccgattaaacctgtttgaccgaatagcctgtttaaccgaataaatgcagcaatatcgggaacaggaacggagccaacaatgaggtaatgatcccgcaaatcaccaatgccagtgagctaaatgcgccttcttgaaaatcgacttcagcgcagcgggcggtacccaatgcgtgagaagcggtccccatagctaacccgcgggaggctttagtgacaattcttagccgattaaacaaggtatggccgaatactgcccctaaaattccgacaaaaatcacgcagacggcgctgatagccggaatgccgtttatagaatctgccactgccatcgcgataggcgtggtgacagacttcggtaataccgatgcggcgatctccggtgttgctcccatccataaggctatcgcggtgccgctgaccatcgccgtgatgctgccgataaaacaaatggtgataatggatttccagcgtgcgcggatctggtgcaattgctcatacaacggaaaagcgagcgccactactgctggttgcagcaggtcattcagaattttgctgcctttaaaataattggcgtagggcatatgggtcagcagcagcaagggaatgatgatgaccatagataccagcaatggattgagcagtggcattttcaaccaaatcgccagcttacgcgcgccaaagaacaccagcagcgttaaaggcagcgaccaccagatatgctccattatttgtcctccgactgttcatctaccgaaccgacgatcttgcgttcccgatggacaaactgcgagctgtaacccaccacgatcatgaccactaacgtactgataaaacacgacacaataataggaccaaactgtttactgagctggtcgtaatactgcatcacgccgacaccaatcggtacaaaaagcagtgccatatagcggatcagaatatgacagccgggtttgacccagcgagacggcaggatttgcgaagacagcagggcgaacagaatcaacatgccaataatactgcccggaatggtcattggcagcagcgcggacagtgcgttacccgcccataaacacaggtaaataaagataaaggcccgtaggtattgccagcaaagtgtaatcacattgcgcataataagtgtcctaagtaacggaggcattcatcatacaattatgccgagaaatgtgctaccgatcacaccatgaattatatctatgcttttatgccatttgcgatggcacactttcgtgacgctggcatgactcgcgcccggttgggctagattttttctgatgattgattaaatacattatcctgcgcttttgccaactgataaccgcgatagaaaaaggccaaaccgagtaatgctgccaccatcagcatcacaaacatcatttccggcgcggcgtaggccagcaaaaatccgcacatcaccggattgatagctccccccagattgcctagattttgtgccccgtaatagctgcctttcaaattcgcaggagcaatgaagtcgatgaataaatactccactggaatcacgataatctcgccaaaagagaagatggtcatcgctagcatccacatcggaatagaaccctgagcggtcataaagcctaacagacccacaataaagaacagagtaccgagcatcagccagcgtattaggttctgctgattcatacgacgacttaataaatactggaacgcaatcacaatcacggcgttgaccgtcatgatcgaccctatcacctgataggcaaatttcgcgttggaaacggtgatcaaatattgcgaaaggtagccagtaaattgcccgaagacgacggcgctcaacatgctgccgagcgtgaaatagaccaagcgtttatcctgacgcagaatgcggaacgtttgggcgaaattcagcggcgcaacgcttttgagttcaagactatcttcccgctctggcgggatgccgaatttgtctaacagaaatatcagtgtgatagcgacggctaaagccaggccaccagacatcaaaaaaggcagcatagggctgaacgccgccatcagcacgcccagcgccgggccaaccgcccagccaacgttaactaacgtatagtttgcagagaaagctttgatgcgctgagccaccggtagccaatcggcgaagcaggctttgaccgcaatgctaaataccgaataggccgaatgtagcactgccagcactaaaataatccacgccggttgttcaatccacggcaaggcaaagaaggtgagggcaaacagggcaatagccacaaaaatcagatgatttttattaaacttatcgaccagaaaaccgccgtacaggctggcaataatccccagagtcaggctggcacccaaaactaaaccgacgcgatccggcgctagctggaagtgttctgccagataaatggtaataaagggcaacgtaatggcacgcccaatagtcaacactaatgaagacagcagaagtgtgaccaccaacggaggaaatcctttcatagtgttatctttttattatgttaattgaatgtgacaatggctcaggcagataccatagacgattgtaataataaaaagagagggggaacggaaaatatttttagaaacagcagatcaacctgaatcgatccgctggtagcagcgcgttatcctaaatattcgataatagaaagaccgccgttgtaatccgtactgtagataattccttgcgcatcgacaaaaacatcgcaggattgaactacctgcgggcgatccggtcgcttatccatcattttagtcggcgcagcgggcaccaatgcgccggtttccctcggctggtatggattactgatatcgtaggctcgcacaccggcattttggtaggtggcaaaaatcagcgacgagctgataaaactgccgggacggttttcatgcaaattatgtgggccgaaatgtgcgccttttttgacgtaatcccgttcatttggtaccggaaaggtggaaatactaatggggttactcggctcgcgaatatcaaagacccaaatgtgcttttccccgtcttcctgattatccaataccgcttcgtccaatacgatcaacagatttctgtcaggcaacggcagtgcagtgtgagtgccaccgccaaaaggtgggctccagttacgatggcaaatcagttttggctggtagcgatcgctgacgtccaacagcgtcaaaccgccgtcgcgccagcttccgtaggcggtatccccgctgataatggcatggtgcagcgcatagcgctgaccgtctggccagcttggtgtttctccgccagcgctatgcatgcccggtagccaataacggccagccaccgctggattgcgtggatcggccatatcgatagtcaggaaaatataatcgctgtaaccatccaataaggctgaaacgtaggcccaacgtccgccaacgtaaactattcggtgaattccaattccatccaacggtaaaaagccgatttgtcgcggctggtcgggaatggaaatatcaaaaattcgtaagcccgcgctccagtttcgctccccctgccgggtattgacggttttgcctaccgattgagtgtaatagactttttcctcggcaaaactagcgtcagcaaacagatctcgggcattaatcaccaatagcagatcgtcgtgagtttgtagatgcacgttccaagtattcggcggcgcagggataaaaccgctggggcgcggattttttgcatcccgaacgtcaacgattgatacaccttgagaaaccatatggccgatataggcgtagccgcgatgcaccatcacctgaacgccatcaggccgcccgccctgatcgctatggccaatcagccgcatattgcggctgtattctggctttggtagcgagctgtgggttgtcataagtttgctccgcggttattgaccatttttggccgccagcgtggcgaaccaaggggaattaaaatcgtcagattgaccccagcccggaataattttgctcagactggcgacgttaaccggccccggctgactggcgagcagagcctgaggaatggcggccgcgcggaattcataggttggcggagttgcctctccggcaatttttttcgccaccaaacgcaggttaaccgccccaattaacttaggatcaaccgctacgctgactttccatggactatttgcttcgcgcatcaattgcaaatcttgatttgaaatatcaatgctatacagtttgatctcatcgcggccattttctttcaatgccttgtaagcaccttgagtaaaggcatcccaggtgccccaaatagcatcgatttttccttttggatacttcgccaaaaccgcgcccactttattcgccgtgtctccctgtacgtcagaggagacggcaccgatagattccagctcatgaatgccaggatgctgttttagcagcgcctgataagcggcctggcggcgttccatcggcgggaaaccggcaacccatagcttgataatattggcgttgccgttgaaatctttcactaactggccgaatgattcgttagttaatgaggcgtcatcttgctgcgtgagggtaacgccgggaatattgcctgaaaccgcggtatcaaacacggataccgcgatgccactggcggcaatacgtttcaccagttcggtagaatagggatcgcggccttgagacaagataatgccgtcgtatttttggctaatagcctgattgacgaaatcctgaaaacgcgcgtcatccccgttactgaggaaggtatcgactttaaaacccagttttttaccttcttttaatacgccggaaaggaactgagtggtgttgtcatccgaacccaggttgcggatgaccgcaattttaatttgtccctgatgattagcgatagcgtttggcaccggcgccaatgtcgtgctttcggcggcaaaaagcggcagggtgataagcaggctcaaagccagcaaagggggggcaattttcttcatcaggggctccgttgtgatgttggtaatgtgtgcaagcaaagggtaattgattttgtttttatggctacctttacgtctggacgtccagatggtgttttgcatcataaccaattattttttgataaggaattaactttgttatgaatttttggatttatttatatcttttagtttggcagcagtcgtcacgccgtttgcagcaattctgttagaaaaaggcatatcggcggaaagctaaaaaccagctgaaaagcgaggttagtcgactatcggaaaaggtgatgaatgggtactgcgatatctattaaggatcgcagaacagagaaaaaccttgtgaataacaatgttgttttggttttccaataagtacctattgatagcactgcattttttctatttttgaattatctacggtattattggtcagatattgacgtaaagtttatgtgatgttcattaagtgaattaaataaataaaaactaaacagtagttaaacaaaatggcttatgccagcctcctgttagtcaataaaaatagacagcgctaagggaatagaagtcaccatgggtaaagttagcaagctattcaatcggtctggagccgataaccattcgatatttaactatactgatgcaggaaacttctactcgggtttgagtgataacttatctttctactctatgtcgcgtggagagttttttattgtttttatgcgctatatattggtgcaaccgttgctgctgattttgctggatgtgttatggccagagcagtttgatgatttaatcgttatttccgtacagtcgtggccagcgctcttgtctttggtgctgctgatgccgtgctactaccgcctaagatcacagggtttaagtccctacctgctcctggtgcatttgtttccactgattagctatcttcctcaaaatatgtttacgctgcctttatgcggcgcatttatactttatctgttatttatcaatatttatccgggttatcatttggactgtgagcggaaaacagaactgaagaatgagcaaccaggagaatatccatttggattgacgtttgtttgttttttagtcttgaatttattaccctttctttatttggatatggatgacgccgccattttgttaattatggtttcgtggatctctttcctgttaaccaagtttcactggccagttgtggtgataaatattgttggttctgtgggtgtttttcttttcctcagctctgatttctcagatttgaagcatcataagaatattattattaatgcggtgataaaaatatcactgttggattcagtgttatttctgatgttttccctcagcctgttcctgaatatgttgttctggctggaagagtaccagcgggataaagggaaagtggtgaagcaatagcgagagtaataatactctttatttcaataggataaaaaaatgccggtcaggtttcccctccggcatttttatttcttgccagccacactaacccggctggcaaactcagaacttatttaacctgcataccaggctgagcgccgctgtctgggctaagcaggaagatatctttcccacctgggcctgcggccatcaccataccttcggaaataccgaagcgcattttgcgtggagccagattagctaccatgacggtcaagcggccttctaacgctttaggatcgggataagcggagcgaataccagagaatacctggcgagtttcaccgccaagatccagagtcagtttcagcagcttatcggaaccttcaacgaaatcagcttgtttgatcagcgcgatacgcatatcaactttggcaaaatcatcgaaattaatagtgtcctgaataggatcatctgccaacgggccagtaacgacggcggcgggtgccagattttctttagaatcgccaaccatctcgtttactttatccagatcgattcggttaaacagcgctttaaacggactaatctgatgatttagcaacggttgctcaatactattccaggtcagttcggtattgaggaaggcctcagtacgttcagtcagcgcgggcagcacgggtttcaggtaagtcatcaacacgcggaacaggttaatgcccatagagcaaatagcctgtagatcggcatcgcggccttcctgcttcgcgactacccaaggtgcttgctcatccacatagcggttagccacgtcagccagcgccatgatttcgcgaatggctcgaccgctttcacggctgttgtaagcctcggcgatagatgctgctgcatcgataaaggtctgatatagctcaggatcggccagtttatcggctaatttaccgtcgaaacgtttattgataaaaccggcgttacgtgaggccagattcaccactttattcacgatatcggcattcacgcgctgtacgaagtcttccagattcaaatcgatatcatcgatgcgtgaagacagtttcgccgcgtagtaatagcgcaggcaatcggcatccagatgtttcaggtaggtgcccgctttaataaaggtgccgcgagacttcgacattttagcgccgttaaccgtgacataaccgtgtacaaacaggttagttggtttgcggaagttactgccttccagcatggccggccagaacaggctgtggaagtaaacgatgtctttaccgataaagtggtacagctcggtggtggagtcttcacgccagaattcatcgaaatccaaatcgccgcgtttgtcgcacagattcttaaatgaacccatataaccgataggcgcatccagccacacatagaaatatttacccggcgcgtccggtacttcaaaaccgaagtaaggtgcatcgcgggagatatcccattgttgcagaccggaatcgaaccattcctgcattttgtttgccacttgttcttgcagtgcaccggagcgagtccaggcctgaagcatttcgctgaatgcaggcaaatcgaagaagaaatgttcggattcacgcattaccggcgtagcgccggaaacggcagatttcggctcgataagttcagtcgggctgtaggtcgcgccgcagacttcacagttatcgccgtattgatccggagctttacacttcggacaggtaccttttacaaagcgatccggcaggaacatgcctttctcaggatcgtacagctgagaaatggtgcggttcttaataaagccgttttctttcaaacgacgataaatcaggctcgacagctcgcggttttcatcactgtgagtggagtgatagttgtcgtagctgatgccaaaaccggcgaaatcctgttggtgttcctggctcatctccgcgatcatttgctcaggttcaacgcccaattgctgtgctttcagcatgattggcgtgccgtgggcatcatccgcacaaatgaaatgaacctcattgccgcgcattcgctggaaacggacccagatatcagcctggatgtgctcgagcatatgaccgagatgaatagaaccgttagcgtatggtagcgcgcacgtcaccaataattttttcgcgacttgagccatagtaggaaattgctttctgtaataggaataaggggtctttgatgttaaccgattcggccggttgtcgctagggtcagcggacgactggcggcgcttaagtcaaatcagcgggctttgacgcagtttttctttatgaactccacgcgattagccgagttctgatatgctaaagcttattgtctttaggttaataacgataaattcaaggagccgggatgagcccaaaatcccccgagcagaccacccctgacctgctgcaatctcaagtttccaaggtgcttaccaccttcacccatccgacgctgcaaaaagacctgatcaccctgcgcgctttgcatcactgtgcgctgttggataatgtgctgcatatcgaactgattatgcctttcgcctggcaatacggatttgaaacgctgaaagaaaccgtcagcggtgagctattacagctaaccggtgccaaggcgatcgactggaagttatcgcacaatattacgacgctgcgccgtgccaacgatcagccgggggtaaaaggcgtgcgtaatatcgtcgccgtcagttccggtaaaggcggggtagggaagtcgagtaccgcggttaatctggccttagcgctaattggggaaggcgctaaagtgggcattctggatgcggatatttatggcccgtcgattccaaacatgctgggtacgatgaatgagcgcccaacttcgccggatggcaagcacatgtcgccgatccaggctcatgggctggccactaactctattggttatttggtgacagacgaaaacgccatggtgtggcgcgggccgatggccagtaaagcgctgatgcagatgttgcaggatacgctgtggccggatctggattacctggtgatcgatatgcctccgggcaccggcgatattcaactgacgctttcgcagaatattccggttaccggcgcgctggtcgtaaccacgccgcaggatattgccctgatcgatgcgatgaaaggcattgtgatgtttgaaaaagtgaatgtgccggtgctgggtattatcgaaaacatgagcatgcatatttgcagcaactgcggtcatctggagccaatattcggcaccggtggggcagagaaactggccgaaaaatatcactgcaagctattggggcaaattccactgcatatctctttgcgtgaagatttggatcgcggcgaaccgacggttatcagtcagcctgacagcgagtttaccgatatttatcgccaacttgcttcaaacgtggcggcagaaatgtactggcaaggtgaagccatcccgacggaaatttctttccgcgcgctataagatcttccctagagccaaaatggcctgtccgtgccttacgcgcaggccatttattctttcagccaggttttagccttaaaattctgctgccaatgggcttatttccccattctgccaaataattcacctatctggcctgcattgctacgccttagcgctggcgtcatgccagtgaactccttataattggcgcgttcttagcacccccgtgctttgccccccttcacactacgtaatcaggtctttaattttatgactgacaaggcacatcagtgcgtcattatcgggattgccggcgcatctgcctccgggaagagtcttattgccagcacgctgtatcgcgaattgcgtgaacaggttggcgatcaacatattggtgttattccagaagatagctactacaaagatcaaagccacctgtcgatggaagagcgtgttaaaaccaactatgaccatcccaacgctatggatcacaatctgctgctacagcatttgcaatcgctgaaagcgggcaccgcgattgaattgccgctgtatagctatactgaacatacgcgtaaagaagaaaccgttcgtctcgaaccgaaaaaagtgattattctggaaggcattttgttgctaactgatattcgcctacgtcaggaaatgaacttctctattttcgtcgatactccgctggatatctgtctgatgcgacgaatgaagcgtgacgtgaacgaacgcggtcgctccatggaatcggtgatggcgcagtaccagaaaaccgtgcgtccaatgttcttgcagtttatcgaaccttccaagcagtacgctgacattatcgtaccgcgcggcggcaaaaaccgtattgccattgatattctgaaagccaaacttagccagttcttcgagtgatatccgtctggatctttgctcttttctatggcagtttttgtaacatacgaatttaaatggagatttgatcgatgagactgtgcgatcgtgatatagaagcgtggttggataatggcaagctggttatcactccacgtccgccggtagaacggatcaacggcgctacagtcgatgttcgcttgggcaaccaattccgcgtatttcgcggtcatacggcggcatttatcgatttaagcggcccgaaagatgaagtcagtgaagcgctggatagagtcatgagcgatgagattatcttgccggaaggtgaggcattcttcttgcatccaggtgagctggcgctggccgtaacccacgaatcagtcactattcccgatgatttggtcggttggctggacgggcgttcctctttggctcgtttagggttgatggttcacgttaccgctcaccgaatcgatcccggctggcaagggcgtattgtgctggagttctataattccggtaagctgccgctggcactgcgtccggggatgttgattggcgcactgagcttcgagccgttatctggcccggcagcgcgcccgtataacagccgtcaggatgcaaaatatcgtggtcagcaaggggcggttgccagtcgtatcgataaagactaagtcgcgttagcctgtattcctgtttggacaagaggacgtcatgagaagattactgacaacgttagccatcttgctggtggtattagtcgcggggatgagcgcgctggtacttctggttaatccgaatgactttcgtgcctatatggtcaaacaggtcgaaaaaaataacggttaccgactggcactggaaggggatatgcgttggcacgtatggccgcgcttaagcattatttctggccgaatgtcactcacagcacccggtgctgatgcgccggttgtcagtgcagaaaatatgcggctggatgtcaaactctggccgctactctctcatcagctagcggtaaaacaggtgatgttgaaaggtgctgtggttcgcctaacgcctgatagcgaagcccgtttacagccagatgcccctgtggctccggcgggaaatgcgccggtaacggaaagcacatcctggaagctggatattgataaggtgcaggtggccgatagcctgctgatctggcagcgagatgctgaccaaattaatgttcgcgatatcaatttattactcgagcaaggcccgcaacgtcaggtaaaagtcaacctgagcagccgggttaaccgcaatcagcgagatctgacattctcccttgacgccgacgtggatatgcaaaattatccgcaacatatgggcgcgaaagtcagccagtttacttacaaactggatggtgccgacgttccggttggcgggattgctgggcaaggttcgctggtggcgacctaccagcaaaataaccagcaggtcagcattgagcagcttaacgttagtgccaataataatgtgctaaccggcagcgttcaggcgcggttgggctttattcctcactatgatctggatctgaaaagcgacagtctcaatctggatcaactgtttggctggcaggcaaaaagcgcggacacttcctcatctgccagcagcagcaaacctttggtagccgcagcgccggttattgccagtcaggaaaccgacgtgggtcgggatttacaagggctgcgtgatttcactgccaaactggcattaaccgcgaccaatctggtttatcgcggaattagcgtgaatcaatttaacgtgctggcggataatcagcagggaaaactgtcggtgagccgtctgtccggtcaggcattaaagggtgagttttctttccccggcactttggatgtcaccggtaagcgcttactcattgctgttgaaccaaccattaatcatgtggatctggggccggtgttacaggctgcggaattgccattggtcctgactgggcaattctcgatgactggtcagttatccggcgaagggtttggcgtggagtcctttagccgccgttggaacggcgatgcgaaactttcaatggccaatgcccaactgcacggcattaatatccagcagctaatacagcaggcggtcacgcgtagcactagcgacgtgaccgcggcggagcgtcttgaacgctataccgaagtcagtcgtctacagactcaattggcactcaataaaggtttattgaaagtcagcgagctgaacgcggattcggctctgatttcgctaaaaggcaatggttcgctgaacttaccggggcaacaagccgatatgaatttggcggtccgtgttattcagggctggaatggtcaggataagctggttaaaacgctgcaaaataccgatattccgctgcgtatttacggcccgtgggcgagtttgaaatatcagttagacgtagagcagttactgcgcaaagaattgcagcaacgagcgaaaagcgctctcaatgaatgggcggagcgtaataaagataagcgcaacggtcaggatttgaaaaagttgctggataaactgtaattacatttcgggttggcagtggggaatccggctgccagcctattttggttgataaattgttattttattgtttgtacctctaacgtttttcccccttaaagctagacttctcatcacagattccctcttctgtataaaatccctgcttatccttgatagatgtcataaactcgcggactgactttaggcagagtgcagaacgtatttttgtccaattcacgaagaaaataatacccggatgcgctaagttccggcctgtatcgggtaagagaggattaatgttggatctattgattggggtggttgtggcggtaggcgttggccgctatatcattaagggctattcagctactggggtgctgatggtcggtggtttactgttgctgataatcagcgcactgatgggaaaaagcgtgttaccggccagcgccacgtcaaccggctggcgggctactgacattgttgagtatgtcaaaatcctgttgatgagccgcggtggcgatctcggcatgatgatcatgatgctgtgcgggtttgctgcctacatgacgcacattggtgccaatgatgtggtggtgaagattgcctccaagccgctgcaaatgattaactcgccgtatttgttaatggtcgccgcgtatattgtggcttgcctgatgtcactggcggtttcttcagctaccgggctgggcgtattactgatggcaaccttgttcccggttatggtgaacgtgggcattagccgtggcgccgcagcggcaatttgcgcctcgccggcggcgattattctggctcctacttctggtgacgtcgtgctggcggcaaaagcatcggaaatgccactggttgatttcgcttttaaaacgactttgccaatctctatcgccgcgattgtttgtatggcgatagcgcatttcttctggcaacgttacctggataataaaagtcaggaaaagcatgaaatgatggatgtgaatgagatcacaaccaatgcgccgagcttttatgccattttaccctttacgccgattattggcgtgctgatttttgacggaaaatggggaccagagctacacattattaccgttctggtgatttgtatgttgttggccgcggttattgaatttgtgcgcagtttcagcgctaaaacggtattcgccggtctggaagtggcctatcgcggaatggcggacgcttttgccaccgtcgtaatgctgttggtggcggcgggcgtatttgctcaagggctgagtacggttggtttcatcagtgggctgattggactagctcaatcctttgggactggcggcatagtgatgatgctggtgctggtcactattaccatgctggcggcaatgactactggctcaggtaatgcacctttctatgccttcgtcgagctgatcccgaaactggcggctcaaatggggataaacccagcctatctggttatcccgatgctacaggcgtcaaacctgggacgcaccttgtcaccggtttctggcgtagtggttgcggttgcggggatggcgaaaatatcaccgtttgaagtggtaaaacgtacttcagtaccggttctggtcggattggtggtggttatcgtggcgaccgaaattctggttccactgcgttaagacttaaatagattaagcagttagacagggtgttaaatggatagcgtcaggcataatacgtcagagcctgacgctatcggcagtttcatttcttatacttcgtcgtccggttccggcactttcagcggagtaattttcacttttagaatccggtggctgctcacttcctgcggctcaaacagataatccccgatctgcaattgctcaccgacctgaggaatacgctgggtgtgttccatcaataatcccgccagcgtgtgatattcccttttttcatcaataggtaagggtaaatacatcaccaaatcctcgagcggcatataaccgttggcaatccaggtaccgtcatcgatttgctgaatatcatgacgagcatccggtacttcaccggctaccggcagattaccagcgatggtttccatcacgtcggttaatgtcactacgccttcaatggatccaaactcatcaaccacaaacgcgaaatgggtttgcgcctgacggaactgctccaaagccattagcagtgaaacttgctcagggaaaatcagcggctgacgaatcagtgcgcgtaaatccagtttctcttgcgaaagctgctgttttaataggtcaataacgtgtacgacccctaaaggctcgtcggtggtgctatcttcggtcaccacaattcgggtatgcagatttttagtcagcagagcagttagtttttccggtggatcgttcagatccagatattccacgtcgtggcgtgaagtcatgatgctgctgaccgttcgctgagctagtcccaatacgcgctcgatcatgcgccgttcctgctggttaaagacttcctgattttggcgcccttgatctgcaatcaggctggcggtgtggttatccagcccggcttcttcatgtttaccactcaagatccgcagtaccgcttctgcggttcgttcacgcagaggacgcgccgaggtgaggaaacgacggcggttaaactgcgcgaactgattcagtgattcaataattactgagaaaccaatagctgcatacaggtagcctttcggaatatgatagccaaaaccttctgcgactaagctaaagccgatcatcagcaggaagcttaaacacaaaataacaatggttggatgcgcgttaacaaaacgagtcaatggcttgctggccaatagcatcatgccgatagcaatgattacggccgccatcatgaccgccaaatggtcaaccattccgaccgcggtgatgacagaatccaatgagaaaatggcatccagcaccacgatctgcgccactaccggccagaattttgcggttttacgctgattattttgctggtgatctttaccttccagccgttcatttagctccatagtggctttgaacagcaggaaaatccccccaatcagcatgatcaagtctctggcgctgaaagggtgctcggcaagagtcaccagcggtgcagtgagcgtcgccagccaagagatgcaggccagcagtaccaaacgcatcgctaaagcgcaaagcagcccggtgactcgtgctttatcccgaagatgacgggggagtttatctgccaaaatggctataaagatgaggttatcaatgcctaatacaatttctagcacgattagcgttgccaatccggcccaaattgttggatccatgatccattccatatgcccagtttcaccttctatttctacggcttatgccgcagtcagaataatgggcgctgatcgggtaaaattcaactctcaatagcctcggggccaagaactgcgggggaattgaccgaagtgatgagtcattatccgaaaattagacaggtatatcgtaatgaggctgagattatcctaaggtaaagttaattagtgggttagcctattgtttacatgatctagaatgaacttaataagcaacatggttttatcggtgacagatgcaaaaaaaatgacgatagataccttgcttgctaatatatggcggataaatatagagtgatttttactcatccatttatctgatttgtaatagattgagatacatttttgctgtggaactgacctgtttaggcatacattctcactcttgctaaaaatgtgccaccgcactgaatttaactggttgatagctcgccgcagtaggttgtctgagaataaggtagggcagatgaagaagaatttgaaggctgtaattcctgtggctggtcttggcactcgaatgttgccagcgaccaaggcaattccgaaagaaatgttgccggtcgtggataaaccattgattcaatatatcgtgaatgaatgcgtagccgccggaattaaagatatcgttctggtcagtcactcatcgaaaaatgcgatagaaaaccattttgatacctcatttgagctagaagttacgctagagtcacgagtaaaacgacagttacttaatgaagtgcaaaatatttgcccgccggatgtcacaattatgcaagtgcgtcaggggcaggccaaagggctggggcacgcagtgctgtgcgcgcagccaatggtcggtgattcgccttttattgtgctcttgccggatgtgttactggatgattctactgccgacctgtcgcgggaaaacctggccagcatgattaagcgttttgaggaaaccggccatagccagattatggtggagcctgttccgcagcaagatgtgtctaaatacggcattgcagattgcggtaacgtgaaactgcagccgggcgacagtagtctgatggccgccgtagtcgaaaagccaagcgtggcggaagcgccgtcaaatctggcggtcgttgggcgttatgtgttgtccgcggatatctggccactgctaaagaaaacgccgagcggagcgggcggcgaaattcagctgaccgatgctattgctatgctgatggagcagcaaccggtagaagcattccatatgacgggcaaatcccatgattgcggcgataaacttggttatatgaaagcttttgtggcctacggtgttcgccatgatacagaaggcgaaaaattctctgcctggttaaaacagcaaatagacgcataacgcagaatccgcgcgtaatttttgaataacaggctttatttgcatgaaaactcgttaggtgaatatgactaaattaaaagcagtcatcccggttgccggcttaggtatgagaatgctgccagcaaccaaagccattccaaaagaaatgctgccaatcgttgataagccgctgattcaacacgttgttaacgaatgtgttgccgcaggtatcaccgatattattttgatcacacattcctcaaaaaatgccatagaaaaccattttgatacttcctacgaattggaggcgatgctggaagctcgagtgaagcgccagctgctggaggatgtgcaatctatctgcccgccgggtgtaaccattatgcatattcgtcagggtcacccggaaggactcggccacgcagtgctgtgtgctaagccgctgatcgacggtcaacctttcgtggttctgctgcctgacgtcctcattgatgacgctaagtctgatttgaccaaagataatctggctcagatgataacgcgttttgaagataccggcgcaagtcaggtgctggttcagccaatgtctgttgaagagctgccaaactactcggtcattacctgcgaagcgccggggctggctccgggtgaggcaagcccgatagtggatatgcaagaaaagccagaaaatctgaccggaatgaagtcaaacctgtcagcggttggccgttacgttctttccgccgatatctggccactgttagagaaaaccgaaccgggtgcctggggacgtattcagctgactgatgctattgctgcgttgaatgctctacaaccggtggatgcggtagcgttgaccggtcaggcttataactgtggcgaaaaactgggttatatgcaggcctatgttgcttacggtttgcgtcatccggttcagggggatgagttcaaggcctggttaaaggattttgtgtcttaatccgctgaaatgatcgtaaatcaggcaaccgttaggttgccttttcttttgggacggcgattattttgcctcaggcaaacgactgcgtacagcaactggccggttgtgctgtctatcgcaccaatcactacccacctgacataatcctgagttaacatgtttcccactgcaaaaacctgcgggcttatcggccaatcgcgggtgtcatcctttagacaggagtttttttaatgtccaaacaacagatcggcgttgtcggtatggcggtaatgggccgtaacctggcgcttaacatcgaaagccgcggctattccgtttccatctttaaccgttcatcagataaaaccgacgaagtggttgctgaaaacccaggaaaaaatctggtgccgagttataccgttgaagagtttgtggattcactggaaaaaccgcgtcgtattttgctgatggtgaaagcaggtgaagctactgacaaaactatcgcgtcgctgactcctcacctcgataaaggtgacattttgatcgacggcggtaatacctattacaaagacaccattcgtcgtaaccgcgaactgtctgagcagggctttaacttcatcggtaccggcgtgtccggcggtgaagagggtgccctgaaaggcccttcaattatgcctggcggtcagaaagaagcttatgaactggttgctccaattctggaaaaaattgccgctcgtgctgatgacggcgaagcctgcgtagcttatatcggcgctgacggtgctggtcactatgtgaaaatggtgcacaacggtatcgaatatggcgatatgcagctgatcgctgaagcttattctctgctgaaacaagcgctgggtctgaataatgaagaactggctgcgactttctccgaatggaataagggcgagctgaatagctacctgattgacatcacaaaagatatcttcaccaagaaagatgaagaaggtaaatatctggttgatgtgattctggatgaagccgcaaacaaaggtaccggtaagtggaccagccagagttctctggatctgggtgaacctttgactctgatcaccgagtccgtctttgctcgttacctttcttccctgaaagatcaacgtgttgctgcatctaaagtgttgaccggcccaacggttaaagctttcgaaggtaataaagcagagtttatcgaaaaagttcgccgcgcgctgtatctgggtaaaattgtttcttacgctcagggcttctctcagctgaaagcggcttccgacgagaataactgggatctgcactacggtgagattgctaagatcttccgcgctggctgtatcattcgcgcgcaattcctgcaaaaaatcaccgatgcttatgcagataatcctaagattgcaaacctgctgttggctccttacttcaaacagatcgctgatgaatatcagcaagcgctgcgtgacgttgcgtcttatgcggttcagaacggcatcccaacgcctaccttctctgctgcaatcaactactacgacagctatcgttctgccgtactgcctgccaacctgattcaggcgcagcgcgactacttcggtgcgcatacttacaaacgcactgataaagaaggcgttttccacactgagtggatggaataattgcttagtttagcgatataagcgtgaatgcatgatatttggcagcgcccatcattgtaactgataatccgttagcctgatgatgtgagctgcccgtaatagaacgtttcttgcaaactatgccttaatctgtaacagcaatagccagatttcgctaacgaatagatagttctaatgatgtattgaccagatctgtcgtaataaacagccctcgcagattaaaatgtgagggcttttttacgtcgaaatgccattgataacgggaaggctatttctcgtggcgttcccgtaggcggccgatcactttactgagatccaaattctgatcttgcagcagaaccagcaaatgataaatcagatcggacgcttcattcgtcagttcttctcgatcgtttaccgttgccgctagcgcggtttctacaccttcttccccaactttctgggcgatacgcttggtgccgctggcgtagaggctggcggtataagaactttcaggatcggcgtttttacgttcagctagcaattgttcgagctgatacaggaaaccccagtcgctagctgccggcgaaaagcagctgttattgcctaaatggcaggttgggccaatcggattcactaaaatcaagagggtatcgttatcgcagtcagggtagatattgactacgttgaggaaatggccagagctttcgcctttagtccatagacgctgtttggtgcgggagtaaaaggtgactttgcctgatttctccgttgctgccagcgcttcccgattcatgtatcccatcatcagaacttcaccggagacggcatgctgaacgatagcgggcatcatgttatcgacttttttccaatctagctggttgatctgttgttcagttaacacactcttatctccacgccttgttcagacaaataggtttttaactcgccaatattaatgatctgtttatggaataccgatgctgctaaagcgccatcgacgtccgcatcgcggaaggcttgcaggaaatgttccggcgtacccgcgccgccggatgcgatcaagggtacacggcaaatggcgcgcatttgtttgagctgacgtaagtcatagccgttgcgtactccatcctgattcatcatattcagaacaatttcaccggcgccgcgtaactgtacttcacgaatccagtcttcggtttgccaggtggtggctttggtgcgtttttcatcgccggtaaattgataaacctgataactatcgctttcggcgtcgtaccaggtatcaatcccgacgacgatgcactgtacgccatagcgttcggccaaacgagtgatcaaggttggatcggccagagccggagaattgatagagatcttatctgcgccgtaagtcaggatctggccagcatcctcgacgctcttaataccaccagcaacgcaaaaaggaatatcgatcacttcggcaacgcgagctacccagcttttatccacgacccgaccatcggatgatgcggtgatatcataaaacaccagttcatctgcgccttctgcggcgtaacgctgtgccagaggaacgatatcgccgatgatttcatggttgcgaaactgaacgcctttgacaacctgcccgtctttcacatccagacagggaattatgcgttttgccagcatgcgatcgcctccttcacattaaatttaccgtctagtaaggcgcggcctacaataacgccttgtactccgctggagcgtagtctggcaatatcgtccagacagccaatcccaccagaggcttgaaaagccacttgtggatagctggcgcagacttcctgatacagttcgacgttagaacctgccagcgtgccgtcgcgagatatatcggtgcaaaggacgtgtttcagaccaaaaggcaggtattgttcgataatttgttctagtgtgacgttggagttttcctgccagccgctgatagctacttctttacggccggttttatcaatacgcacatccaacgccaggacaatcgcatcggctccgtaacgttcaaaccagctctgtaccaactctggctgcctgaccgccgttgaaccaatcaccacgcgggtggcgccagccttcaacaaggctgctacatcctgttcattacgaatgccgccgccgacctgcaccggtacttctacgccggccagtagctcacgtaataatgggatctggcgggccgcaggatctttagctccggttaagtcgaccagatgtaaaacctgcgcgccttgctgctgataatcctgtaaacgcggcaatgggtgattgccgtaatcgcgctgttggccgtagtcgccctgatgcaaacgcaccactttgccttcgatcaaatccaaagcgggaataatcatggtgcctacatctccaaaaagtttttcagcaattgtgcgcctgctgcacccgaacgttccggatgaaactgcacgccaaagaagttgtctttttcaaccgcggcggtaaacggctcgccgtagttggcctgggcgatggtatttggacatattggcatcgcatatccgtggacaaaatagaagtaggtgccatcggcaatgccgcggaacagatgattacctgcctgagcagaaatctgattccaacccatatgcggtagcggtaagccaaaatcggtcatgagttttaccggtgcatcgatgatacccaaggtgtcgataccgccgctttcttcactgtggctagccaaaagctgcatgcccagacaaatccccagaaccggctgagtacaggctttaatcaactcgatcagttctcgctctttgagctgttccatggcggcatgggcggtacctacgccgggcaaaaacagcttatcggctcgtagtgcgatgtccggatcgcggctaatgaccggttcatagcccaaacgttgaacggcgtaggtcacggaggagagattggcgcatccggtgtccagaatgaccacgttcattacagcactcctttcgagcttggcagcgtattgccttcgacgcgaatggcctgacgcagcgtgcggccaaagaccttaaacaaactctcaactcggtggtgatcgttgcgacctttggttttcaggtgcagggtacaggccatggcgtaagacagcgaacggaagaagtgctcaaccatttcggtgcttaaatccccaacgcgctgataattaaattcggctttatattccagatgcgggcggcctgagatatccagtgcgcagcgcgccagacattcgtccatcggtagtacaaaaccgaaacggccaataccacgtttgtcacccagcgcactgttaatggcttcacctagcgctaatgcggtgtcttccacggtgtggtgatcgtcgatataaagatcgccgctaacctgaatatccatacggaatccgccgtgggtggctatctgatccaacatatgatcgaagaaacctacgccagttttgattttgctgccaccttcccgatccagccacacgttcacatcaatggccgtttctttggtcacgcggttaacgtgagcgtggcgatctcgctgagtcaactgtttggctatctgtgaccagttcagaccatcacgttgatagcgcagtccactgatgcccatattttcggccagctgtagatcggtttctctatcgccaatcacatagctattggctccgttcatcacgccgtcggtcaaatagttttctaccagtgccgtcttaggcttgcgacaggcgcagttatctgccgggaggtgcggacaaattaagacgtcttcgaagtggatgccttgggaagtaaaaatctgcatcatcaaactgtgcggcggatcgaaggattcctgagggaaactgtccgttcccagtccatcctgattagtgatcatcaccagtttgtaaccggctttttgcagagccagcagagcaggtatcacttccggttccagcgccagtttatccagccgatcaacctgatagtcttctggcggttcagcaatcagggtgccgtcgcggtcaataaaaagaaatttctggctcataacgttcccttcaaaggctggatgatgatgtattggttgcattggggctatttataccgggtaaagtggctagggctgaaataacccgttcgcattcctgacgagtgccgatagtgatacgcaggcacccagacaatcccggctgtttattctggtctctcaggataataccttgatcccacaagcttttaaacacgctactggaagcagaaaatcgtgccagaacatagttggtttcactggtaaacacctgttctacgcagtcgcaattttgcaattcgccgatgaaccattcgcgagttgttcgtatctcggccactcgctggcgcatggtggcgataccttgcggactcagtgcctgcgctgcgatatccgccaccggagtggaaagcggataaggagcaatcactttaagtagcagctggataatatcgttgttagctagcgtaaagccacagcgtaaaccggctaaagcaaaagctttagatagcgtgcgcaaaatcactaaattcggataatcttttaaccattcgctgacgctagcctgcgggcaaaactcgatataagcctcatctatcgccaccacagcgcggtctttggccaactccagtacctgacgcaagtcctgttgattaatcaggttgccggtgggattgtttgggctacagacataaaggacttttacgccatctagactgtcggcaatcgccggtaagtccaactgccagtcttctttagcgggtacggtacgccgttctacgccaaaggtttctgcgctgaccgaatacatgccataggtcggtgggcaaaataaaatggcatcctgacccggttcgcaaaaggcacgaatcaacagttcgataccttcgtctgcgcctcggctgaccaagacttgatcggccgctatgcctgcataatcggcatagcgttcaatgacttgcttaggctgacattctgggtaacggttaaaggtttgcgccgttaaggtaaagttcggcgcttgcggatattcgttggcgtttagccatacatcgccgttaccgcccagtcggcgcgcagacatataaggagtcagctcgcgcacattggcgcgggccagttcgataatagacgcactcattttgactcctttttaatggcgttaagggcggtaactcgcagggtaacggcatttttatgggccgttaactgttcagcctgcgccagagtttcaatggtcggcgctaaatccagtaaaccttgcggtgttaactgttgcacagtcatgcgttttacgaagtctgccaagcctaaacttgaataagtcgaggtataaccgtaagtcggtaatacgtgattggtgccggaggcgtaatcgccagcggattccggagaccaatcgccaaggaataccgaaccagcgttatcaatcagagcgaccattttttcgggttcacgcgtttgcagaatcaagtgctccggaccgtattggttactgatatcaatacattgctggagatctttggtgacaatcagacgactgctttccagcgcctgacgggcgatagaagaacgagaaagctgagctagctgtttttccacttcaacggcaacggcctgagcaatggcggcatccggagtcagcaaaatcacctgagaatcagggccatgctctgcctgagaaagcaaatctgaagcaacaaaggctggcgtagcgccgctatcggcaatcaccagcacttctgacggacctgcgggcatgtcaatagctgcgccgtcgaggcgttgactaacctgacgtttcgcttccgtgacataggcattgcccggcccgaagattttgtccactttgggtacggattcgctgccaaaagccatggcggcaatagcctgtgcaccgccaagctggaacacttcttcaatgccacaaagctgcgcggcatagagaatttcatcggcaatcggcggcggtgaacatagcactacgcgtttacatccggcgatgcgagctggggttcccaacattaatacggttgaaggcagcggggcagaaccgcctggaatatacaggccgacggaagcgatagggcgcgtgatttgctggcagcgcactcccggctgggtttcgacgtcaaccagcggcgttttttgtgctttatggaaaatttcaatattgcgtaccgcctgcgccattgcctgtttaacatcatccttcagacgtgcggaagcggcggcaatatcggcagcgctgatacgaatatcggctacctgcactttgtcaaaacgctggctgaagtcgcgcagggcgctatcaccctcgcttttcacccgatccaatatctcattcaccgcggcagtaatacgctctgaggcgttgattgccgggcgtgtcagtaacgctttttgctgttctaaactgcattgctgccagtcgatcagagtattgaagttcgtcggctgcatggtttactccatcatcttttcaataggaaggaccaaaatagagctggcgcccagtgcttttagtttctccatggtttcccagaacagggtttcgctactaaccatgtgcatggctacgcggcttttatcaccggccaatggcagaatcgttgggcgttcggcgcctggaagtagggtaatgatttcatccagacgttcgctcggcgcgtgcatcatgatgtatttcgattctcgagcttgaataacgccttgaattcgggtcatcagtcggtcgattagctgctgtttagcttctggcatttcgccatctcgttgaatcaaacaggcttttgaacgataaattacttctacttctcgcagcccgttggcttccaatgttgcaccggtagagactaaatcgcagatggcatcggccagacccgcgcggggagccacttcaacggagccattcagtaaacaggatttaaaacggacgccttgtttatcaaggtattgctttagcaggtgcgggtaagaggtggcaattcggctattttgcaagcattgtgggccgctatattccgcatccagcggggtcgccagagacaggcggcaagtaccaaaatccaggcggcgcagggtaaagtaacgaggatcttccccttgggcgcggcggttaagtaattcttcttccagtacgttttcgccaataatgcccaaatcgactacgccgtccataaccagaccggggatatcgtcatcgcgaacgcgcaggatatcgataggcatgttctctgcgaaggcaatcaggcgctgttgttgcaggttgattttgataccgcagcgtgacagcagttcttgggaatcttcgctcaggcggcctgatttctgcattgcgatacgtaaacgtgttttatctaacatggtaaacctcataacttattcatttaaattcaaaagttttgggcaacaaaaaagccctcggaagatgatcttccgagggctttctttaatgcgttcttacgccacctggaagattcgttaaccgtcttccagcacacatcggcctgtcagactagtcaggatgatggtgatgatggtgattaaattgaacgcgattcataatggtttctcacttggggttatggactcgctgccgataaccagaatttgtaaagtatcgtttgctctgtcaatcaacctaaactatctgatgatgtgaaagcaatctttttttattaagatgattttatttcacgcatgataacccatgtggttcggggctatcctcttattcagatgaatcattgctggcgtggaatttgtaagccgtatatttagcttgttacgccttggtattatcctgatttgagggtaatttggcatgatgaatggaagacgactcggccgtagcccaatggcttaggagcctgagccatgagtttttactgcacaggcaggagagcagattgatgaaaaaggtcgctatcataggtttaggctggttgggaatgccgttggcccagtccttgctgcggcgtggcattcaggtggtagggagcaaaacaacgcctgacggtgtagatgcagcccgcatgagcggtattgagtgttatcagttggttctgacgccggagctgatttgtgatccggaagatttaccacatcttttcgatgctgacgccttggtcgtgaccttgcccgctagccgcaccgcagaggggggcgaaaactattttctggcggtgcagcaggtggttgatagtgctctggtttatggtattccacgcattattttcaccagttccacctcggtttatggagataccgttggaaaagtgaaagaagattcgccgctgaatccggtttcggtggcggggaaaacgctggtggaattagagcaatggctgcatcgattgccccatacttctgttgatattcttcggcttgccggattggtgggcaatgaacgtcatccggggcgtttcctggcgggaaaaacgggcgtaaaaggcggttcgcaaggagtgaatctggttcatcaggatgacgtgatcgctgccattgaactgctgctgaagttacccaaaggcggacatacttacaatttatgtgcgcctaagcatccggccaaaaaagatttttaccctgagtttgcccgaacattgcaactcgcaccaccggagtttgctgctgaagaggaagagcagcccagccgtctggttgacggtagccggatatgcagcgaactggggtttgagtacacttatccggatccagaaagaatgccggtaagctagtcgttagtgtgaaacggtgtggggatcggatttcggtttgcagtcgtttggttaatcttgaactggatgatatcaaccgaaatctgatccttttgacagagtaaaattcagcttaatccaatctcgatcacttgcttaaacgccggacgctggctgatttgctgataccaacgtgccagatgcggatggtggctgcgttcgatcggtaaattgaaccaggcataagcgatgcaacccagaggaatgtctccgacaccaaagtgttggccagataaataaggctgtttttccaattcgccgtttgcaatccccatcagagcatcccattcttttatgccctgctgaatcttctgtttatcctgctgttccggcggagttcgtaccaaaccaacaaatgcagctttgaacggagcggctaaagcctgagcccaatccatccatttttctgcgctggcacgctgttggatgtctgctaggtaaagtgtgctcttttcgccgtatttcaatgcaatatagcggacgatcgtgttagattcccacaaaataaagtcgccgtcttgcaggcagggaatcagcccgttagggtttagtgaacggtaatttgggtcgtccagcttgccaaatttgccgccggcatcaatttgctgatattcaatgcccaattcttccagacaccacaatactttttttacgttggtggaattgtttctaccccatactgtcaacattgattcctcacttattgacctgaatgattcggtataatcgaagtgttatcgtcactataagccggtttcatagcctaaagaagtatgattgtgtatcaaatactcaccgtgccaatgagcgatattccattcgttgagaatggcgagatctgccaattggttattgggattgataaccgtcgcgtaatctacaaactccaacattggcctatcgtttattgagtcgctgtagccataagtattggaaaaacagagaggtggcgagtttttcagccactcattgatgcgcgcaaccttaccttcgcgaaaagtgagtacgccgtaggtatctccggtaatccggttatcttccagcgcgacaccaatggccaacgcagtatcggcgcctaattggcgagcaataggtgcgactaaatgctcgccgctggccgagataatcagaatatgatctccccgctgtcgatgccaatccaactgctcctgcgcctgcggatatactcgcggcaaaatttcctgctgaataaaactttcaacccaacctgtcacttcttgtatggaatagccgactagcggagccagcgtggcgtgcatgtaacattccatggaaagctgaccgcgataataatcctgcatcaattcctgttctttttttagcaaagacagcggagcccgttttttcgccactaaccagcgcaaccacaggctggcactgtcttcacaaatcaaggtttcatctaaatcaaataaggccaggtccatggactacctctcaatgcaattatgactgttaaagcgtggcactgtcggggggatgagcctgggccaggaacaaccacagtgacaaagccattaaccgtaaagtaatccggtgaatgaatactgagtagcgcattgaatacaccacctaagagtaaacgaaaccgctgtttcctatggcttaggtaatgggttacggcaaaagatttgctgtcttcaatctgtccttcggcggaaaaagagacaaagaataagtcaaaaatgtgaccgtttaatggcgaaaagcggcatttcgaaggattttcacggatattctttactctttccgcgcacatcattcgccgtgaaagaaataacatagaacctaaagatattggtggcgggcagattttgcgtgttaattgtatatatcgtttggatatagattgttaagtagatagacgagaatgctcttaatgagaggcgatttttactccacaagaaccttgtcgtcagtctgttttccccacagcttaggagcagattatgtttgttattcgtttgtattgttgtccggtattcatgggttctgagcaggataaaacgcggaataatcatactatcggagtaaaaaatgagtcgccaaccaacctcttaccgtctacctcttctggatctgtctcagcttaagcgcggagaaacgcagcgccaggcatttttgaccgaattacgccatgctgcgcgagatattggctttttctacctgaccggacacggagtcgatcccgagctgtcacggcaaattcagaacctttcccgacgtttctttaacttacccaccgccgataaactggcggtggagatggtgcattcccctcattttcgcggatataaccgagccgcttcggagctgacccgcgggcaaccagactggcgcgaacagtttgatatcggcgcggagcgttcacctttggaactgcgtccggaaacgcccggttgggcgcgtttacaggggccaaatcagtggccgccagctttgccggaattgaagcctctattgctacaatggcaagcagagatgactcaaatggcgctgcatttgctacaggcttttgcgctggcgttggaactggacgaacacgcttttgatgagctttatggcgataaacctaatgagcatatcaaactgattcgctatccggggcgggaaactacccaaagcgggcagggggtgggcgctcataaggattcaggcttcctgagtttcttgctacaggatcaccaaaaggggttgcaggttgaggtggaagacggcttatggattgatgccgagccgttggaaaacacttttgttgtcaacatcggtgagttgctggagctggcgaccaacggttatctgcgcgccactgtgcatcgggttgaaacgccgccggcgggtgtcgatcgtctgtctattgcctttttccttggggcgcgtctggatgcagtggtgcccttgtatcagttgcccgaacatttggcggctgaggccaacggtcccgctagcgatccgctcaacccgctatttcgggacgtcggcgttaactatttgaaagggcgcttacgttcccatcctgatgtagctcaacgctactacccggatgtgttagccgctgccgaactaacgatagcttaaccctattgctgataaccgaataaattgcctgaggtaataacgatgaataatacgtttgcaatgggtttcgcgcgtaccgcgctgatcacgacgctggcattttccctttctgctcaagcttatgcggcaaatgccttacgggtggctgccgatccggtgcctcacgccgagattttacagtttgtgcagacattggatccgtcgctgaatctgaaggtgattgaaattccgaacggtgtgaattctaacgaactgttggcacatggcgatgtggatgccaattatttccagcatgcgccttatctccattcacaggaacaggcgctagggcaaaaatttgccatcgtcgcgacggttcacgtggagccgctgggtatttattcccataagtataaaactttcgccgacgtaccggaaaagggcacgatcgccgtacccaataatgttactaacctgagtcgcgctctatatttattacaagatcagggtcttatcacgctaaaagcaggatttaccgatccggctaaacatcaggctacgccgaaggatattgccggtaatcccaagcaattgaaggtgctggaaatagaatcgccgcagattcctcgttcgctggacgatgttgatttggcagtcattaacggaaattacgcgttagaggcggggttaaatccagcgaaagatgcgcttgggctggaaaaagccgctggcaatccttatgccaatattctggtgacgacgcctgccttagaaaatgatcaacgtatcagacagttagttagagatttacagtcgccgcaggtggctaagttcatcgccgaaaagtatgccggatcagtcatccctgtggtcgccgtggacagtaaatcatgatcgccatcgaacggctgagtaaaacctatcagcatgctgggcagccgatggttgccctacaggatatttcgctgacggtgcctaccggttcggtgttcggcatagtggggcgcagcggcgcggggaaaagtaccttaatccgttgcttaaatttgttggagcggcccagttcaggccgtattcagcttgatggccacgaattgaccactcttggtgataaagcgctgcgcgtcgagcgtcagaatattggtatgatttttcaaaatttccatctgctgcactcgcgcaatgtcagcgacaacgtagcggtgccgctggaaattatcggcataggaaaaaccgagcgaaaacggcgagttaccgagctgttggcgttggtcggattattggataaagccgaggcttttccctcccagctttccggcgggcaaaaacagcgggtaggtatcgctagggcgttggcggccaaaccgaattatctgctgtctgacgaagcgaccagcgcgcttgatccggaaactaccgcttctattctggcgttgcttagaaacattaatcagcaattaggtttaaccatagtgctgattacccatgaactggaagtggtgaaatccatctgtcattacgcggcattgatggagaaaggccgagtgattgaaaccggcgctattgcagatttgctggctgatcctgcatcacgccttggaaaatcactgttgccgacctgcggcagcgagctgttgagcggtacgccggtagcggaattgaccttcttcgatacgttattggcttcgccggtgttaagcgcattggcgcatcagcatgcggttggcgtcagattgctgggcggcggcgtagaatctattggcggtcaacgggttgggcgtttgcaggtggattttagtcatccggaaggcgggttaaatctggctgaagtgctgcaatttctaaacgaacgcggcgtgagggcggaattgatatgagtaacggtatggattggcaggaattagtggatttgatcacaaatgccaccggtgagactttgtatatggtgatattggccacgttcttcaccttagtaatcggtttacctttgggtattctgctgtttatatcccgtaaagacggcgtttttcccctatcgcgtatcaatgctttgattggcgcaatcgtgaatctggggcgttccatgccgtttgtggtgctgttgatcgcgttgattccggttacccgctggatcatcggcaccacgctaggcagtacggcggcagtggtgcctattactttaggtgccattcctttttttgcccgcgtagtcgaagcggcattggacgaagtggataaagggcgtatcgaagcgattttatctatgggcggttcggcgtggcacgtcatccagaaggttttactgccggaggctctaccggcgctgttagctggggtgacgttaacggtagtgatgctggtgggattttcttccatggcaggcgtgataggcggcggcggactgggcgatttagccattcgctatggttatcagcgatttaataatgaagtgatggttgccaccttagtggtactggtgattttggttcagggagtacaaagtctgggcgatcgctgggtgaggtctttagcgcatcgacgctaatataacgcgttttaaccactcaaacccataccagcccgcaggccacgcgggctgttgtatttctcttatgctgacaccgcggcgttttatttccaaaatggtcgattatagtcacgcttaatatcactgcggctcataccaatatcccgtagctgggtttcagtgagtctttgcagcgtatgcattgccagccgccgttggttccaatcatacaaagcattccctatttttaggctgaaacgcagtaaaacatttcgccgattttctttatcctgtgattggggtgaatggcatttatccatctgattattaaccatattgctcatagctcgtgactccttatcggtggaatatcagcatgaggctttggctaaaaacattacagatgcaaatagggactattatttccatacagatgtgagataaatgaactgaatggtgagaaattgcgccatctgtactggttatcaattttcaggtggtgctatttgtgacacgttatcaacaattggctgatattctcagcgagcgtattgaacagggtttgtattcttgtggtgaacgtttaccttccgtcagactgctaagcgaggagcacggcgttagcatcagtacggtccagcaggcttatcgttctttggaaaagtgtctattgatagaggccagagccaaatctggctattttgtgcgcgggaatccacgccgtccggaactgcctgcggtttgccgccatgctcagaggccggtagaaatctcgcagtgggaacacacgctggcatttctccatgacagtaccgaagaagacgtattgcatttaggctcaggtacgcccgatagttcaggccccggcttaaaggtgctcagtcggttgcttagccgcatcagtttgcaccaaagtgaagccatcatggcttatggcagtttgcagggaagcctgattttgcgcgagcaaattgcccgcctgatgctggatagcggcaatcaccagtcagcggaaaatattattattaccgccggttgccacggtgctttagcgattgccttgggggcggtatgtcagcctggggatatagtcgccgttgattcacccagctttcatggcgccatgcaaagtctgaaaggcatggggatgaaagtgattgaaatcccaacggatccggtgatcggcattagtctggaagcgttggaaatggcgctggaacagtggccgatcaaagccgttcagcttacccccacctgcaataatccgttgggttacaatatgccggatgggcgtaaaaaagccttactcactttggctcagcgttacgatatcgccattattgaagacgatgtttacggttcgctggcctaccaatatccgcgaccggcgactattgcctcgtttgacgacgatggacgagtgttactgtgcagctcattttccaagacgttggctccggggctgcgcgttggctggattgcgccggggcgctatttagaaaaagcgttacatattaaatacattactgctggtcgaacccctacgttacagcaattggcggtagcggagtttattcgacagggagatttcactcagcacctgcgacggatgcgccgtcagtatcagcaaaatctcgatattatgacccattgggtgaccaaatattttccgcccagcacttgtctgagtcggccgcagggcggttttatgctgtgggtagaactgccggaagggtttgactctttgcgccttaaccgcattttattgcctcacaaagtgcagatcgccgccggttttatcagctcggcgtcggggaaataccgtaattctctgaggctatgttttagcaaaccgatgacggacgaaattgagcaagcggttaaattggtaggaaaaacggtcagtgaaatactggcggaaggttaaaaaaccgattgataaacggcccgatagcaggccgttggtgactgagatctattctggctgggattaacccgccaatgcctgcgctaaatcggcgatcaggtcttcggtatcttcaattccgacggaaagacgtaataactgcggcgtaatgccgtgtttaaggcgaatatccaagggtatcgaagcgtgggtcatgctgtaaggaaggctgattaggctttcaacaccgcccaaactttccgctaacgtaaacagatgagaacgtttaatcacttcgcgggcatactcgggttcgcctttcagccgcacggcgatcatgccgccaaaaccggacatttgctgacgcgccaactgatgctgaggatgacttttcaaccccggataatacaccgcttccacctgcggttgctgttccagccactgagcgatatgcaacgcgctttcattgtggcgtgccatacgcaacgctagagtccgcaggccgcgcagcgtcaggaaactgctgaacggatcgagaatcccgcctaccgcattgtgtaaaaaaccgagttgttccgctaattctgagttatttcctaccgcagcgacaccggctaccacgtccgaatggccgttcagatatttagtggctgaatgcaccacaatatcaaaacccaaatccagcgggcgttggatgtaaggcgaggcaaaggtgttatccgccacgctgattaattgatgttttttagcaattgcggcgatggcggccaaatcagccagttttagtaacggattggtgggcgtttctacccaaatcattttagtatctggttgaatcgcctgttccagcgcggtggtatccgctggtgaaacgtaggttacgcgcaggccagcggtgcgattgcgcactttttccagcaggcgataagtgccgccgtacagatcgtccacggcgacaatatggctgccctgatccaataactctaacaccgtcgaacaagccgccagaccggaggcaaaagcgtagcctcgcgtgccgttttccagctcagcaatggccttttccaacgcgctacgggtcggattgccgctgcgggaatattcgtagccggtatgctctcccggtgcgggttgagcgaaagtggaggtcgcgtaaatcgcgggcatcactgcgccagtgctgtctggggtataaccggcgtgtacagtcagggtgtcaaactttgccataataaggtccttgaaatataaattaagccagtgcctggcggcgggcatttagcacatcggtgcgggtaatcaggccgagaagacgctccccgtccagcacgatagccacatgtccctgatcgaatgtggtgagcaagtcggtgtaactcgcttctttctgtaaggtctttacctgccgcgtcattgcttcgctgaccgctaaattgaaatggcgggcatctttttgcacgctattaagcaaatcccattcgtcaatcaaaccgacgacgcgttcgttttccagtaccggtagttgggaaatatcgtaaagacgcatacgagcatgaactaccgccagcgaatcttgcggtgaaaccgaaacggtagcgccgtcctcgtggctataggtgatgtaatcgcgcagatcgccgtgcttcgggcgagtcagtaaaccctgttccagcagccagtaatcgttaaacattttcgaaagatatttattgccactatcgcaaacgaaggtgacgacgcgtttcggctcggtttgttcctgacaatagcgcagggcagccgctagcagagttccggtggaggaaccggccagcacgccttcttcttgcaacagacggcgggcggtggcaaaggcttccgcatcatcgatttggtaggatttcgtaacctgcgagaaattgctaagggggggaataaaatcttcaccaatgccttccaccagccagctaccggcttctccgatccgatctttcgcgacgtaatccgccaaaatagagcctaacggatcggccagaacaaattgagtattgggggccacttcggcgaaatactggcttaaaccgctaagcgttccgctggaaccaacgccaaccacgatggcatctacctgaccttccatttgttcgaataattctgggccggtggcgttacggtgagccgcagggttggccggattattaaactgatctatataaaacgcgccgggtatttcctgtgacagtcgtagcgcgtaatcctgataataggccggatggcctttacccacgtcggaacgagtcaacagcacctgcgcgcccaatgctcgaagatggaagattttttcctggctcatcttgtccggcactaccagaatcagtttgtacccttttaatgccgcgactaacgctaatcccaaaccggtattacccgcggtggcttcgataatggtaccgcccggctgtaaatcaccgtcacgctctgcctgttcaatcattgatagcgccacgcgatctttaatcgagccaccggggttctggttttccagtttcacaaacagctgacaaggaccagtatcaaagtgcgtgagttccagcaggggagtgtgtccaataagatcgatgactgaacgcgggattgccataactgctccagaagccaaaagaacgggtaaacgatggcgagagcatagcgcctgttacttagtcgctaaaaataacaaataaccctcttatatttcttttggttatataaagtgaggttttaagacgtttgggtgcttagatggaaagccgtacagctatcaagatgtttagccgtgtagccattgaaaacatgaccaagcgtaaataagcgcaaaacatcacccctttgtggtcgttatcggatagatttaaagagggtatgaaattttgactaagctaaagtctctaccctagtgaaaaaacgcgatttttttacgtattgaataacggcttagttctgggaataccgcttatttcctattatttgcaaggatactctggcgacctcatgatgaaatatacaatctcctccaagctaaaaaacgtcactttcagtgccggtttactgttgctggcgttacctgccgtcagagcggcagatgagcaaccggctcctcccattgatgctaaagcttacgtattgatggattacaacagcggcaaaatattggctcagaacaatccggaccagcgtctggatccggccagcctgactaaaatcatgtccagctacgtgattgggcaagcgattaaagcgggcaaagtccatcctgatgatacggttaccgtgggtaaagacgcttgggctaccggtaatccggcattgcgcggttcgtcgttaatgtttttaaaaccgggcgatcaggtcaaattgatggatctgaataaaggcattgttattcaatcaggtaacgatgccagtattgcactggctgattatattgctggcagtcaggacagttttgttggtttgatgaataactacgccaaagctctggggctggataatactcacttcctgacggtacacggcctggatgcggaagggcagtacagtaccgcgcgggatatggcggtattggggcaggcgctgattcgcgacgtaccggaagaatatgcgttacataaagagaaagagtttacctttaacaagattcgtcagatcaaccgtaatcgtctgttgtggaacagcaatcttaacgtcgatggtatgaaaaccggttataccgcaggcgctggccataatctggttgcttcggctaccgatggtcctatgcgtttgatttccgtggtattaggtgctccaagtgacagagtacgttttagcgaaagtgaaaaactgttgagctggggcttccgcttttacgaaaccgtggtgccgattaaaaccgacaaagccttcgtgactcagaaagtctggtttggcgataccggtcaggttgatttgggcgtagcgcaggatgcggctatcaccattccgaaagggcaaatgaaaaacctgaaggccagctataaattagattctaccgagcttcgtgcgcctttggctaaaaatcagaaggttggcgtgatcgatttccagctaaatggtaaaagcatcgaacagcgtccgctggtggtgatgaacgaagtgaaagaagggggcttccttagccgcatctgggactttgtgatgatgaaatttagccaatggttcggcggtatctttggataatcgcgacctaggttaaattcagcgataaaaaaacagggccgcaataaataaatgcagccctgttttattttcagtactaaagcgactatcactataaaactgattcagtataaaaccggttagaagcagaaaaaccgatcagtcgcagggaacgattttaatcgccagcccgccgcgagaagtttcgcgatacttggcgttcatgtccttcccggtttcgtacatggtttcaatgactttatccaggcatacgctaggctcgctggtacggcgcagagccatacgagcagcgttgacggcttgtaccgctgaaatagcgttacgttcgatacaaggcacctgaacctgcccggcaaccggatcgcaggtcagcccaaggttatgctccatcgcaatttctgcggcgatacacacctgcgccgggctaccgcccatcagttcagccaaacccgctgctgccatcgaacaggctacgcccacctcgccctgacagcccacttctgcgccagaaatagaggcgttcattttatatagcgcaccaataacgccggaaaccaagaagaaacggctatatgagttttcgttaaccggacgaataaacttatcgtaatacgccaataccgccggaatgataccgcaggcaccgttagttggtgcggtaacgacacgcccaccggccgcattttcttcgttcaccgccagcgcatacatgttaatccagtccactaccatcatcggatcggtgttatttttgtcgttggtcaccagcatacggcgcagggctgcggcgcggcgtggaattcgcattggcccaggtaacaaaccttcggtattgataccacgctcgataccgcttttcatcacttcccaaatggcggaaaagtgcgcgtttagctcttctttggtatgcaatgccagttcattttgcagcactaatccagacagagacagaccggtttctttacagtgtttctgtaaatcacgggctgaattgaatggataaggtacagaaacttgattgctggctgctttgccaaaattctcttcgtcaacgataaagccgccgccgatggagtaataggttttgctgtacagcagtttgtcaccggcaaaggcactgatggacataccattttcgtgcagtggcaagttggtttcgtggaaattcattcccccatgtagcgggaaatccacctcatgagcgccctgagccagtagcagacgctcacggtgttcaacatcacggataaactccggaatgctatcgatatcaacggtatccggcagattccctgccaggcccataataatagcaatatcggtatggtgacctttaccggtcagggataatgaaccgtaaacgtctacggaaattcgggtaacggcagaaagatgccctagtgcgatcaagtcatcggtaaacagcttaccagccttcatcgggccgactgtgtgtgagctggaaggaccaataccaatcttaaaaatgtcaaaaacgctgaccatatactcgcctccttcgtgttaaaggcgttaattatgaaattgcttacattaccgtggagtggggagccggtacgatcgcaccggcttttgaaactttaagtctactgctaactgttttaccgtcctaaagatgaacggtagcgaaaagtggccagcgcagcgcaccggccgaacagtcttatttgaacaggctgaacagaattgctgagatggcaatcagacccataatcacaacgaatacgttgctgatatggccactgtatttgcgcatcgctggaactttgtgaatcgcatacattggcatcaggaacagaatcatcgcgataaccgggccacccagagtttcgatcatgcccagaatgcttgggttcagggttgcaacgatccaggttgtgaccagcatgaacagcgcagtgatgcggttcagtttgtcgccgttaatggttttaccgcggctacgcagagatttaaccaccatgccgttgaaaccttcacgagcacccagatagtggcccaggaaagatttggtaatagcaataaaggcaataaccggtgccatgtaggcaatcatcggggtattaaagtggttagccaggtaagacagaatagaaatgttctgtgctttggcttccatcaaatctgctggagacaggctcagaacgcagctgaatacgaagaacatcacggtcaaaaccatcatgatgtggctgtatgccagaatgcgagaacatttcttctcagcgtcctgaccgtattcttcacgttttgctaccgcaaatgcagagatgataggggaatggttaaaggagaacaccatgaccggaataaccagccacagggtcatcagcataccgttgcccacaccgttaccgtcgatagacaggttttggaagatagcgctgctccagtttggaatcaggtacagagccaacagcatcagtaccgcaacaaacgggaataccagaatactcatcgcttttacgatgaagttttcaccaaaacgaacgatggtcatcagaccaacgatcaaaatcagggacaaaatagcccgtggtggtgaaggcaggtgcatctggtgagtaataaagctatcaacagtgttggtaatcgcaacgctataaaccaacaaaattgggtagatagcgaagaagtacagcagagtaatcagtttacctgcgccaacgccgaagtgttcttcaacaacttcagtgatgtcttcgcccgggtttttgccggaaagaacgaagcggcaaagaccgcggtgcgcgaaaaatgtcatcgggaaggcgatgatagccatcacgattaacggcagtaaaccaccgataccggcgttgataggcaggaaaagcacgcccgcgccaattgccgtaccgtacagacccagcatccacatggtgtcgcttttacgccaggtgctggttttggtgtttcccgtggatgaaatggtgccagtttgagtagtgtccataaagatctccgatttgaacacgaaattgaaattaagatccgaaagttaaatacctgttagtgcgttataagtcgcataatcagatgaaaaattcagtcacagtaatgcgttttaaatcttatcaggtcgatttggttctctttaagtagtgcaaataacctgaagtcgtaaaaataaaatttaatccgcggcgagcagtgatgtctctctatgctgatatttttatggttctaattcgtaccctggtttttgctggcggcaagataacgattcatagtgaaaagtaccgtgatcatgctctcaaatgctgaataaacgcctttaaacccagttgttatgaatttccatctaattgttacaattatgttcagtgttttgtactgcacctgcttgataaatgataaatgataaaaagcaaaactgtatttcaatttagattgagtcagcgacttaacctttgctctttatatcttgaggcgcaatatattttaaccagcgcgtcgaatctagcggaaatcgaaattttcagtattttattgacgaaagtcataatgtcaaaacaacagaaattacataacttattgattttaaatttaaattagtgtttatttccgttgggggataatgtgttgatattaatcagtatcacgcagcgctgtttgttatataaacagttaaatatctgagtaaaaggaaagagttaaattctatttgtttgacaagtttgctttaaatactgacttaaggtttatttgtcatatgaaagtgaggcaagttacttttgtctgacaatataaaaggcgagttttagtgcttaaaggtgtctggcagtaataaatgttaaaataatttacttttcaaaccgactgttcgaacatttaataaacaaccattaaaagtgaagtgcgttttttataggcaggaagtcattaaccataatataaaaaaggttatttaattatgccgtcaatcgggtgaaaatttaatccctaactgaaaagtaaagtacgtgatgatatttataatttgctattttggcagaatgaggaacggataaagtcagttaatcaaactcagttctaccgtcggatagaaaagggggaattcattcgctaaacggtactttcggctcaaagatcgccaaacatcgaacatgagagccgcgtttgctaactattgtcgtttaactgtggatttctatgctggtttcgttaaagaacgaacggaaggagccatcaggctggcggtcggtgaccagagtatcaaatagcgtcagtggcccaatactggcaggtttgatttggccgaatttactgtgatcggctaccagaatcttgcgctgagatttgttcagtgcgcgctgtttccacggaatttcgtcgaagttaaaacaggttgcgccgaattcaatgctcactccggcggcagagataaaggctttgttcgggcaaacgttatccagctcgttatgctggccgatgggtgagaaaatatagttgtttggcttgaattcgccgccgcacaagatcactttgcagttcggtttatcttgaagcgaaagaaaggtattcagcgaataacagagggcagtgaaggtcaactcttcgggaatttcgtcgataattagtgggatagtggtgccgcaatcaaagaaaattgtgtcgttttcttcaatgagctgcgcggccagttgcccaattttgcgcttttcctctacctgttttgcctgctgatcggaaacaaaatagttgttagcgctgttcgacttgggatccatcaccacataaccgcccagtagaatcacggcagaaggttccgcactaagatcccgacggattgtcatttctgaaactcggagcaaactggccgcgtctttcaaatgaattttgtcggaacgttttaaagcgtgagtcagtttattaatacgttcggcacggcgagtttccattaacgcttcccaacaaagtaaacccggcctaagccgggttaaagataattagtagctggacgcagccgcttgctggccagatacgatggctacacctgaacttgtaccaattcgcgttgcgccggccagaatcattttctcggcagttgcgcggtcacgcacggcacctgaagctttaacacccatatccgagcctaccgcagcacgcatcaatttcacatgttcttcacgggcgccgccggtgctgaaacctgtagatgttttcacaaaagcaacgtcaagttcacggcacatttcgcaaacttcaacgatttgctcattgctgagcaggcaggtttccaatattaccttcaacggaatagcggcgcaaatatcgcgtacggctttaatatctgctttaacttcagcgactttaccgctttttaaccaacctacattaatcaccatatcaatttcttgtgcgcctgcttcgatagccgccttggcttcaaatactttgctggaagtcagacctgcgcccagagggaagccaatcaccgagcaaactttcacatcgctgcccgcaagctggctggctgccacaggaacatagccggagtttacgcaaacggcgtagaaatggtgttgtttggcttcttcacacagtttgacgatctgcgcttcggtggcgtccatggctaatagggtgtgatcgatataattagcatagttgatagtcataaaaaatgtccttggtttgtgtaggtaatatcatttgttgtgataatagtaacatttaacgcaaatgacaacctttatgttgttaatatcacatgtaaaagccatattttgttatttaaataacatttagtgatggtgttagttcttgctatgaaagagataggagatataaccggctgatttatgatgagttatcttgagagacagagattcttgcgagcaaaccggcagaggttctgccggtaaaatgcgaacagttggcagaaattaatcttttacccaacctttactgataggaaaagagaagcagcgttgataaagattcgccaatcctttcgcgatgttatcgccaaacagattccacagtaactgtgaaaataagcagccgacgattgccaccaagaagccaccgaccatatctaacggccagtgtacaccaaggtagatccgcgaccaggctatggccaacccgacgatcagcaaggcaatgccggaccaaatccgatgccagcataaaaaggccagcgcaaaggtaaagatggcggtgccatggtcgctggggaaggagctgtccggtgcgtggggtaaaaagttatagccgaaaccatcgacaaaggggcgattatgcgggaataacataccgatacagaccgatgaaagcattgcaaaaatcagcgcaatggcggttttactgatggtctgacgctgtagcgacatttgttctcgcgggccccacagccataggccgatcatcagtaatggaatgatgctgatcagatctctggcaataaaaatggcgaacttcaccaaccactcgggtgaattgggcgtggcgttaatcagagaaaacaaaaaatgatttaattgttccattactcagtaccttaatgacggtggtcataaccactaatcaaccaaaaaagagccaattggctaagccagacccaccacccagcccacaggttatgagtcagaaaatgtgccccgcgcatgacctgaccgaatcccattatcattcccaaacatacgccgactatccagcaaagcgtagcaaggcgagggcgttcaggataaaacaggaagaatacggccatcagcgcaaaaccgctggaggcatgtcctccggggaaacagtgaccggggcctgcgccagccggagctgtatccattaatatgtagctggcggcttttccaccgtattccaccagatcccaaggacaggaatgagcgctggtagatttcaatatcccaataaccaaagggccaacgccgatcagcatcgtggtcaccaccagtcgaaaatttcggcgatagactccccaaaatagcgagcagacggccgcgctgataatcgtgatttttaacagccggtgattgaacaaatctaaccagtagttatgttcccaagggaaactctgggtttttggatcaaaccaatagccacttatcagcaagtcgagttgttcattacgagataaccacagaaacaccaatccgctgattgttaacccaaaaacctgccaaaggtaaaaggataacggcaatgagtaaagggggtttgtcctaattatcactcccgttgagccttgatttaatgatgatggagtgttttcactgttcttcacggttaatccagcaggatattcataatagtcccactgtaataattctatattaagaaagccttagggcgcttctgacgcagataggagccgttttagaaaagggaatcagcgtgttagtaacgctaaggattagggcgagagaaatgagcgtgcagccaagggaaaagggctgattactttgaaaaccgggcaaattaacaggataataaacgctgaaaaacgactaagaagaagatgtgatgagtcgattaaacaaaactttcgttcctttgtacgctatcggtattgccttattgagcgccagtgctgctgcggagcgagttagcataacgaaacctttcgtgtgccctgatatttcacccttgccacagcatgtaacaagtgaaggtaatctggtgatcgatgggcaaacctattatctttggaatcctaacgcagctgcggcttcagcgcctttgaccaataccatctggtcatctgctgacggcaagaccgaagttgatattatgcagtatcgagacggacgttttcagcaggcatttatttcgttctctaccaacattcggaaactgccgtttggtgaagatccagagagatatatcaacggagagagagattcctacatggacggtggacagggttgccataactgatcgtcagtcattcagccgaatcgcagccgccgcacggcggtttttttgtgcctgagcagaggtgtttagctacgctgccgccaatttgccgccattaagctgaatcagtatttaatcttgttgtttatagggttactttatttcaggcaagaaaaaacccgattagtcttgaacctaagaaggcgggactatcgggctcctcaatatggggacatcaaagaaaagcagtggcactaattcagactacggctaaaccattaagttcttgccgaatgcgaaaaatataaaatttattgtaccttcaccgaaaatagatcggcgctatccccaaattcccggccagataatcacaatcagcgaaccggccagggtcagtaatacgttagcaatggcgtaagtgcccgcgtaacccaacgctggaatgttactgcgggccgtgtcgctgataatgtccatcgcaggggcgcaggttctggcacccataattgctccgaataatagtgcgcggttcattcgtaaaatataggcaccgaacaggaagcagataatgactggcaccagactgactatcaggccggatatcagcatttgcccacccacggcacccagactgctattaataccgccaccggcgctcagaccaacgccagccataaacaccatcagcccaaactctttcaccatattgagcgcaccctgcgggatatagccgaaagtcgggtggttggctcgcaggaagcccagcatgatgccggccatcagcaagcctgctgcgttaccgataccgaaactgaaattactgaattggaaggtaatcagaccaatcatcaggccaataataaagaaggcacagaaagccagcagatcggtgacctgactatgaatggaaataaaaccgattttttccgcaacgcttttgacccgacgggcatcgccgctgacctgcaagacatcgcctttattcaatacgatgctgtcatctataggcatttcaatctggctgcgaataacacggttaaggaaacagccgtgatcggtcagtttcaaatgactcaggcgtttacctaccgcattactgtttttgaccacgatttcttcggtaacaatacgcatatccagaaggtcgcggtcgaaaacttctttaccgttacggaaactgggatcgaggcgcgaatgagcatccgggtagccaactagcgatatttcatcgccaacctgtaacaccgcatcgccgtccggattagccagaatgccgttgcggcgaatacgttcgatgtaacagccggtctgacgatagattcccagctcgcgtaaatttttgccgtcggcccaggctaccagttccgggccgacgcggtaagcgcggatcacgggcaaatacactttacgctggctatcggtatccagaccgcgctcacgggcaatttgctgggcgctggtcggcaaatcctggtgttgcagttttggcagataacgcgcgccaaaaatcaggctaaccaaaccgatcaggtaagttagggcatagccgaggctcaggttatcctgtgcgtgttgcaacgtcgggttattggcaatggtatggcgtagggtgtctccggcaccgaccagcactggcgtcgaggtcatagatccggcgagcataccggcggtgaggccaatgtcccaaccgaacagtttacccaacccaagcgccagaaccatggcgcttccgaccattaccagcgccagcatcaggtagtttttgccatcacggaagaatatagagaagaaatttgggcccgcttcgacgccgacacaaaaaataaatagcataaacccgaggttcagggcttcggtattgatagcgaaatgctgttgtcccaatagtagagaaacaaccaatacgccgatagagttacctaactggaccgagcccagccgtaatttaccgaggcacaaccccagcgcgagaactacgaataacagcagaatgtagttgccgtttaacagatttgcgacgtttatattcacggaggataacttattgtttaacctgaagtagataacgctaaaaagggttatgtgacccggtaatatctgcattcgttgccagataaatgccttcagcaaaatctgatgcatgtaacggcaatggcggtggttattctagtctgtccgagggattacagccagtagtaagcggggaaatcggtgttagcggataaatatgcttttaacggggaaattaatagcgggatcggccaaaaaatcaggccttatctgtgggattttcgtgattttattttgaagtttcatgagagcgttcaagccaaaatacagagagggtgccgaagctccctctctttatcgcacctaagccatcaattaatggcttaggtatcgctattatttgaacagattcagatgttctttagcgtaagcttcaaaatcagtgaaaccaccgatgtgtttttcatcgataaagatttgcggtacggtttcaaccggcttaccgacagttttttctaaatcggctttggtgatattttccgcatgaatgtcgatatagttgaaatcaaaatcgtcacgctcagctttcagtttttcggccagctctttggcacggacgcagtaagggcaaccaggacgtccgaaaattacagtaaacatgcaaaactccttgattatattgagttaatcacttcgtctgccaatcagtgtatcttcgattgctgaatgacttgtcgcgtattactcactttcattgggtgttactatgcccgttgatgagacgaaaacaaagtaggaattgcctgttaatccgattatccgaacctatttatatccgtcgattctttggcttaaccgattatttacattcattgagtgttgtagcattggcggattcaacacctttggctaaatcttataagtagttgtacaggaggaaaagatgcgtgctttaggcgatatgcccaaaatggtgattattttggaagccttgggaatgttattactggtgctggcctatttaagtatcaatcattatgtcacgctgcccgctggattaagcgagcctatcgtcgcgattatgatgatatttattggtattgggctaatggttccagccgcagcctgcatagtctggcgtgtggcgcagggttttggcccgctattgggaatgaatgggatcgataaaaaagacaccgccaaaacggcagataaagaggagaaaaagccttaatccctgataacgataatgacaaagacttctttttcctgttgtttgcgtatctcttcgcatatttcgcagatagtcacggcttttgctgtcaattagtctggattggtcatggcgctaacggcgaatattccgtaagctatgccacttttcttgttgcaagaatcgtgaggtaggttgctatggattcactcatcgtcccggatttagccttattacggcgttggctggatcagttagggatctcgttctttgaatgcgactcatgccaggcactgcatttgccccacatgcaaaattttgaaggcatatttgatgccaaagtggacctggtagataacgttattctcttctctgcgttagctgaaatccggcctacggcgctgattccgcttgttgcggatttaagccaaatcaatgccagctcgttaacggccaaggcctttattgatattcaggatgataatctgccgaagttgattgtttgccagtcggtgtacatcacccaaggtattacgctggagcagtttggccactttatgcagcagagcgaagagcaggtttcgatgattattctggaagcccgagcaaacgatctgctgttcatcggtgaaaccgaagaggaagaagggcaggtcgtgccgacctctttcccggttattcactgatttagctggccgccatccccggcggcatgctgtttttcatttttcccgccataagatcctctgctttttaccctagtttgccagatatttagcgccgtttatgccacaagtggcgaattacatagattaactatgcataaaaagtcgataaaaggcgttttttacgctggatactggctcgtataactatcaggggttatgctttatgctctgcaaagggcatatgattacccccgcaaattcgtggttattgacgcttaatcaataactcactccagtgcatagccatgcataacgagtttgtggcaatagcgctcgatcaggaaaggtgttgtacccgtcgggtacaaattcaattctatgatttaccctgttctggaggagttcacggatgttcacccaacgtaaaaaatggttatcgggtgttactgcaggcctgcttatggccgcgtccgtctcagtttctgctgaggaaaaaatactgcacgtttataactggtctgattatattgccccagacacgctggtaaatttccaaaaggaaaccggcattaaagtggtttatgacgtgtttgactccaacgaggtgttggaagggaagttgatggcggggagtaccggattcgatctggtggtgccttcggccagtttccttgagcgccaattatccgccggcgtatttaagccgctggataagaacaaactgcctaattataaaaatatggacccggaattactcaaactggtgagtcagcacgatccggaaaataaatacgcgatcccttatctgtgggcgactactggcattggttacaacgttgataaagtgaaagcggcgctgggaaccgatgcgccaatcaacagttgggatttggtgctgaaaccggaaaatctggagaaattgaaaagctgcggagtgtccttcctcgatgctccaagtgagatttttgccactgtgctcaattatttgggcaaggaccctaacagcagcgatgccgctgattacaccggcccggcaacagatttgctgttaaaactgcggccaaatattcgttatttccattcttcccaatacattaacgatctggctaatggtgatatttgcgtagccgttggttgggctggtgatgttatgcaggcctcaaaccgagcaaaagaggcgaaaaatggcgtcaatgtggcttacagcattccgaaagaaggggctttggcattcttcgatgtttttgccatgcctgcggacgctaaaaatcaggatgaggcttacctcttcctcaactacctgatgcgcccggaagtgatcgccaatatcagcaaccatgtgttttacgccaatgccaataaagccgcgacgcctttggtgaatccggacgttcgggataatccggggatttacccgccggcggacgttcgcgccaaaatgttcaccctgaaagttcagtcgccaaaaattgatcgggtgatgactcgcgcctggactaaattcaaaacaggtaagtaataccgttgattgagccgttggctgttttcagcggccaatctggtatcacctaaaatgatgaggggagaaacagtagggaaaccggctgtttctgttgctattttgtgccgcattatgatgtggcctcttctgcttctacggagagcacgcagagtgaatgatgtaatttcccgtccgccgttgaaatccctgaaggcgtttacccctttattggaaattcgcaatttaaccaaaatcttcgacggtcaggcggccgtggatgatgtcaatctaaccatttataaaggcgagatttttgctttgctcggcgcgtccggctgcggaaaatcgacgctattgcggatgttggcgggttttgagttgccgactcaagggcagattgtattagatgggcaggatttgtcccatgtgccgccttaccaacggccaattaatatgatgtttcagtcttatgcgttatttcctcatatgaccgtcgagcagaatattgcctttggcctaaagcaggacaaattgccgagtggggaaattaaaagtcgggtagaggaaatgctggcgctggtgcatatgcaagagtttgccaaacgtaagccccatcaattatctggcggccagcggcagcgggtggcgttggcgcgtagtctggctaagcgacccaagttactgctgctggatgaaccaatgggcgcgctggataaaaaactgcgcgaccggatgcagttggaagtagtggatattctggaacgggttggcgcgacctgcgtgatggtgactcacgatcaggaagaagccatgaccatggctggacgtatcgcgattatgaatcgcggaaaatttgtgcaaatcggtgagccggaagaaatttatgaacacccgaacagtagatttagcgccgaatttataggttcagtgaatgtctttgagggcgtgcttacggaacgccaggaagatgcgctggttattcgcagccctggcctgcgtcatccgttgaaagtggattcagacgcttctgtagtcgacggggtgccggtgttggttgccctgcggccagaaaaaatcatgctgtgcgaaagcgtgccggaagctggttttaactttgcggtaggtgaagtggtacacattgcctatttaggggatttgtcgatttaccatgtcaaactccatagtgggcaaactattagcgcccagctgcaaaacggccatcgttatcgtaaaggtatgccaacctggggcgatgaagtgcgtctgtgctgggaaacggatagctgtgtggtgctggggagctagaagatgatacctaattcggttcaagcaacgccggagccaccaacccgccaatccggtgtgttaatcgctcgcctacagcgttggcaaatggctcatggccgcaaactggtgataggtttgccctacctgtggctgtttttgctgtttatgctgcctttcctgattgtatttaaaatcagtctggctgaaatggcccgtgcggttcctccttacaccgatctcatgacatggatggatggcaagctggatatttctctgaatctgggaaattacctgcaattgctcgacgatcctctgtatatcgacgcctatttacaatctttgcaggtggccggtatttccaccttgtgttgcctgatcattggttatccgttggcctgggcgattgctcacagcagtcattcgacgcgtaatattctgttgttattggtgattttaccttcgtggacgtcatttttgattcgggtttacgcctggatggggattctgaaaaacaacggtattttgaataacgtgctgatctggctcggcgttatcgatcagcctttggtcattttacataccaatctggcggtatatatcggcgtggtttatgcctacctgccatttatggtgttgccgatttataccgcgctaacccgtttagattattcgctggtggaagcggcctccgatcttggagccaaaccctttaaaacgttcttcagcattattgtacctttgaccaaaggcggcataatcgccggatcgatgctggtgtttattccggcggtaggggaattcgttattcccgaactgttagggggcccagacaccatcatgattgggcgcattttgtggaccgaattctttagcaatcgtgactggccggtcgcttccgccgtagcaaccgtcatgctgttactgttgatcgcaccgatcctttggttccataaacatcagaataaagaaatgggaggtcaaggatgaataacctacctgaggttcgttctgtctggcgacgggtgattctggtggtgggattcacctttttgtacgcgcctatgctgatgctggtgatctattcatttaacagcaataagttggtgacggtgtggggcggttggtcaacccgttggtataccgaattattccatgattctactatgttatcggcagtcgggctgagtctgaccattgcggcggcttcggcgacgatggcggtgatactcggcactatcgctgctttggtaatggtgcgttttggtcgttttcgcggctctaccggttttgcctttatgttgactgcaccgctggtgatgccggacgtgattaccgggctgtctctgctgctcctgtttgttgcgatggggcacgctatcggctggccggcggagcgcggcatgttcaccatttggctggcccacgtcaccttctgcactgcttatgtcactgtggtcatcagttcgcgactgcgggagctggatcgttccattgaagaggccgcgatggatctgggtgccacgccgctaaaagtgttttttgttattaccgctccgatgatcgctccggcgttgatctcaggctggctattggcttttacgctgtcgctggacgatctggttattgccagttttgttgccgggccgggggcttcgacgctgccgatgttggtattctccagcgtgcgtatgggggtgaatccggaaatcaacgcattggcaacgctgatcctgctggtggtcgggattatcgggctgatcgcctggcgaatgatggcgcgctcggaaaagcagcgatcgcgtgaattacgcaaagccgcccatggctgaaatttcccaaagctgctaggctttctctcgatcgcatgccgtctgcgggcggcgttaatgtgaaagataacatcaggttgcgggagagggtggatgagtgtcagtctgggagaagggcaagccaatatgaaagtttccgcagccacgccagtcgccgtattagtcggcggcaccgccattatcgcgactcgggttttaggcctgttgctgctggtagccgaactgggcatgggcggaatgcagctttttatcgcggaaaatctgcaaagttgggattctggcctgatcttgctggctagtctggggctggttttcctcgaaattgcctgcggacgagctgtcatccgtcgtaagaactggggtcgttggtgctatctgctgtgccagattgtggtggtagtttatatgctgctggcttcactggactggttgtatgttgatgtattccgcattgagggcgaaaacgaagccgaggtgttccacagtctgttaatacaaaaaatccccgacgtggtgattatgggtctgttgtttattcctttccattcgaagcgttttttccgccagtcaaaatgagtgtttcccgacgcggggtggtacaatccgcccccattggcggccgagagcgctgcaaatctcaacgtaataaatcataacggtcaatattcatgcattgcgcacagtatacggcgggcagctgccgttcctgtcagtggttggagaaagattactcccaacaactggcggataaacaacatcatttagaaaatctgctggccgggcaaccggtagctcaatggctaacgccggttttcgggcgtgaaagcgcttttcgtaataaagcgaaaatggtggttagcggcagcgtagagcgtccgttattcggtatgttgcatcgggacggaacggcggtggatctgagcgattgtccgttgtatcccgccagttttgctgcggtatttgccgttttgaaggtttttatcgctcgtgccggtttaacgccctataacgtggcgcgcaagcgcggcgagttaaaatttctgctgttaaccgaaagcaccgtcagcggcgagttgatgctgcgctttgtgctgcgttcggaaactaaggtagagcagttgcggaaaaccctgccgtggctacagcaacaattacctctgctacgggttatttccgtcaatattcagccggtgcatatggcaatactggaaggggagcaggaaattccgctgacggagcaacaggcgctggaagaacgctttaatcaggtgccgctgtatattcggccgcagagtttcttccagaccaatcctgatgtggccgccgcactgtacgccacggcccgcgattgggtacgtgagctgaatattggtagcatgtgggatttattctgcggcgtcggcggttttggtttgcactgcgctacggcggaaactcgtctgaccggcattgaaatcagcgctgaagctattgcctgtgcgcgacaatcagcggaaaaactggggctgaaacaggtcagttttgccgcattggattccacacgttttgccaccggcgagacggaagtgccggaattggtactggtcaatccgccacgccggggcatcggcgccgcgctttgtggttatcttagccaaatggcgccgccgtttattctctactccagttgtaatgcggaaaccatggccaaagatatcgctgcgctagcggattaccgcattgagcgagtgcagttgttcgatatgtttcctcataccagccattatgaagtgattacgctgctggtgcggcgcgagccaacggcttgagtttcgaaaagcttaagtgctgaatcatagaaaaagccgaaaatcattgttgaaatccggctttttatctctgtaatttctctggaatatcaggcaattctattgattgcaggaattattgcgggaaccatttgtcattaatggttttataagtgccgtccgccttcactgcatcaatcgctttattcagtttgcccaacagctcggtattctcagggcgcactgcaatgcctaaacctgtgccgaagtattgtgcatcggtaacgtgctctcctacggaagccaattcagggttactcttcagccattcgttgaccacggcggtgtcaccgaatacgccgtcgatacggccatttttcagatctaaaatggcattctgatagctgtcgtaagacacggtctgaatttcaggatgcttttcctgcatgtatttctggtgtgtagtaccgttttccattccgagacgcttgcctttcaaatcggccagagaggtgaacttgcctttatgggcaatcacaatcgcggagttggcgtagtaaggctgagtaaacgcgacctgtttgctccgctcaggcgtgatatccattccagaaatgacagcgtcatagcgacgaaattttagcgcaggaatcaggctgtcaaaggcctgattggtaaaggtacagttggcttccatttgtttacacaatgcttttgccaaatccatatcgaaacctacaatctcattattggcccccatagattcaaacggtggataggttgccgaggcggcaaaacgaatggtttccgcagcgctagcgctaaaggccaccccggtcagaattgtcgccagtaatatctttttcatgcctaaactcctgtctgaaagtctttaatagggtgcaacattacttattgattttattaccgctaaggaacttttagcggtgtgaaataccataatcaattggaattacattgccaccttgtgaattaatatgcaagaaaagtgattaaaaatataataaaaaaatcaacataatcctcttcgccaaaagcgtgttaaaaatgccgcagtgggaaaaatgagcttggcaataatcaggggggaaattgcgtttttgacgtgggatttattcttgacatgaataaaaaaccccggcagataccggggtttcaaagtgcagtgatttaaggcttaattacgacgttcgaaggccagcgcccgacgttcaaccagacgcatcagtagagtcagcaagccgttaacacacaggtaaacaatacctgccgcgccaaataccatcacgtcgtaggtgcggccatacatcaactggctgtaacccatcacttccatcaatgtaatggtgtatgccagtgaggtacttttaaacaccaacactacttcgttggaataagacgacagagcgcgtttaaaggcgaacggcagtaaaatccgcagcgactggcgtttggacattcccaacgcttcgcaagactgccactgaccggcaggaattgcccgaaccgctccatggaacagcagtgtggtataggccgcgctgttcagcgccagtgcgatcatggcacacagccagggttgcgaaagtacatgccacagccacggatattcgcggatcgccgggaattggccggggccgtagtaaatcagaaagatttgtaccagtaacggcgtgccggtgaacaacgtgatgtaaatcttcaccaactgcgtggctatcggggttttcagcgtcagaatgatggtgaaaatcaacgacagtaccaacgccaccagcagcgaaacaaaggtcagcgtcaggctggtatgcagcccttttaggatctcaggtaaataatcaaacatcaggatgggctccgttcaaaacgcgtggtacggagttcaatcagcttgattacatactgacttagcagagtcaccaccagataaattgcagcggcgatcatataccaggtaaaaggttcctgtgtgcgcgtcgcgatgcttttggtctgcaacatcaggtcatttacgctaatcaacgacactaacgcggtgtctttcagtaaaaccaaccactgattacccagccccggtagggcgtggcgccacatttgcggcataatcaggcggaagaagatcgtcgcctgactcattcccagagcctgcccggattcccattgaccggcaggaatcgctttgagcgcgccgcgcagcgtttgcgaagcataggcagaatacagcaacgccagcgcaatcacgccgcacaggaaagggctgacctcaaatgtgtcgatattcagcttcaccggcagttcgaacagatagaaattcagagtgaagccgtctgacagcatcatcagtaattgtgatgaaccgaaatagataaatagcacgaccagaatctctggcaggccgcgtagcagcgtaacccaggcggtgcccagatagctgatgaccttccagcgggaggattcccaaacggcgaacaacattgccagaatgaggccgagaaccagtgcgcaaacggcaaggccgacggtcatgccggcggcgcttgctaaaggttgaaattcattcatgggtgcttaagttactgttggaaccattttttgtaaattgtctgataggtgccatcggctttcactttcgccagtgccgcatctaacttacccagtaattcggtattgttctgacgtaccgcgatgcccagaccggtaccgaaataatccgcatcggaaattttgtccccgaccggcatcagttcatgactctgcttcagccactcgttgaccactgcggtatcaccgaatactgcgtccagacggccattttttagatccagaattgcattctggtagctgtcgtaaggcactgcggtgatttcagggtgcttttccaacaagaatttctgatgcgttgagccgttttgcatgccgacgcgtttaccttttagcgcggccagatcggcgattttgcctttctgagcgataaacagcgctgagttatcgtaataaggtttggtgaacgcaacctgttttagacgctcaggcgtaatatctacgccggaaatcactgcgtcgaaacgtttgaatttcaggctcggaatcagactgtcaaaggcctgattggtgaaagtgcagttagcctgcatctctttgcacaacgcattggccagatcgatatcaaaaccctgcattttattattagcatcaataaactcgaacggcgggtaagacgcttccgccgcaaaacgaatggtttcagccgcagaagcagacagactgatactggcaaggaccgctgcaattaataattttttcatcgaaaattcccaattagatatcaatgtgacagatagctggcaaaagcttcggtgtgaggctgggcgaaatgactggcatcgccttgttccactacgtgaccgttttccatataaaccacccgactggcagttttacgggcaacttcaacttcatgtgtgacgataacctgagtgataccggtctcggacagctcgcgaattatgctaacaatttgcgcggtaatttccggatcaagcgccgccgttggctcatcaaacaacagaacctgtggctccatcattaatgctcgcgcaatggccactcgctgctgttgccccccggaaagatgcagtgggaaacggtcggcaaagtcggtcagccgtaaacgggacagcaattttttcgcgcgcgccatcgcctgatctttagatagaccaagcacccgacaaggcgcttcaatcaggttttgcaccacggtcagatgcggccagagattatattgctggaataccatgcctacattctgacgcagttcgcggatcgctttcgcgtcaggagcttgggtaaagttaaaatggttacccgcgatctgtaatgtcccagagcgtggcatttccaaaaggttgagcacgcgcagtaaagaacttttacccgcgccgctagggcccagcaaaaccagggtttcccccgctggacagttcaatgtgatgtcgaacagcgcctgatgtgcgccgtagtaacagttaattccgttaagttgaatactcatgcgccaaatctgaatagccaatgatgcggggaatgttaacttccgcggcatacttatgcaatctttgtgcgttaaaatttattaataaccggttggaacccgcaaagctagcataacctctgggtttatttcccgtggagaggaatttgtcgtgtggtgaataaaactggcagagaattcactgaggcgcataaatggctgccaccagtggtgcgattctccggccagtttattgtctgagctagcgctgacccaacagctggcgcagagagctggctggagcattggcccccataaagcgaatatcgtctactacccagcaactgccttctcgtaccatcaaaacttcatcctgccagcgagattccttaccgtccggcgcgcggtgtaccagagtcactcgtagcggtatatttttggcatcggtgttgggaatggtggaggcgctggccacatctgcgtcactgacgccggcgtaaacgctggcgatggcctgatcggcatgggtggtcgaacggttagcgctctgcgtctggcgcgccttttgaatatcctgatacagagcctgactcaggaaaggacgcagttgttctgcggaataattagcagacgcagtgcccgcagcgcccatttgctgtacgcgtaagttatagaactgttcagcgacttgatccgggccgccttccacgcaagggccgttgcgactgccgatatccttaaacgcaggtgtaacgggagtggtacaggcactcagcagtaacgccaagggtaataccagtgcaatattttttttgttcattttattacctatgtgaaatgccagacatgcaactcaatcatgcagttaatatagtataaatttatttttacggatgaacttagggtgcgtcttatttacttggagttcatgttcatgttgttataaatatctatctgaaaatgatatgtaccgcctattatttgggcgatttagggtttttatctttggtttaaggaatatgccatgcagttatctaccactccgacgttagaaggttttaccatcactgagtattgcggtgtggtcaccggtgaagccattctgggcgcgaatatttttaaagatttcttcgccggcgtgcgggatatcgtgggaggccgctccggtgcctatgagaaagaattgcggaaagcgcgacaaattgcctttaaagaactgcaggaagaggccgtgcagctcggagccaatgccattgtaggcattgatattgattatgaaaccgtaggaaaagatagcagcatgttaatggttagcgtcagcggcacagcggttaaagtatcccgttagtggttaaattggcttggtaatccgaattgtttgctgatcgtgtcggtatagaataaaaaggtaacgaatattttacctttttattcaacttattaggttaattcatttaacgcattcctcttactcatacctattaacgcgaaacgcgaaattagtttttattaggtaaaatccggaggaaaccgataaggatatcgagatgaaacaatgcttctggatgctgtttattatgctgttggtaccgtttcatgcgctgggggctgtacaggaagacaaggctttggttgaccaagggagttttatgttgaatgactctcgtcaggcaatgggcgtcgatcggcggattcgctttttggttttacattatacggcactgaattttcctgaatcccttaacgtgctgacaaccgaacaggtcagcgcgcactatttggttccagcttatcctccccgagatcaccatagtggtaaacccgtcgcctggcagctggttcccgagcacctcagagcctggcatgccggagtgagcagttggcgtgggcgaactaatctcaatgacacctctataggcattgaacaggaaaacccgggattcaccagtaccctgttggggaagatacattggtacccttacacacctcaacaaattgaactggtcactgctttggcacataaaattatcgaacgttatgaaatagagccacgtaatgttgttgctcacagtgatattgcgccacagcgtaaagaagatccggggcctttgttcccttgggagcatttggcgaagcaagggattggggcgtggccggacgtcgcggatgttcaatattatctggggaagaggcgtgcagatcgggccgtgccagtaatgccgctgttagctaaactcagctgttatggttatgaaatcacgcctgatatgacgccggaacagcagagaagagtgattagcgctttccagatgcattttcggccctcggatatacgcggtttgcctgatgcggaaaccgaggcgatagccgatgcattattggttaaatatcataagcctgaggaaaataaggatgtcgagcttcggatgagtgagtctgcgctcaatagcgtgagtgccgagtgcgataaactctaaaagtgtcgcgaaaaagcagcgtagcccgttggtttcgctgcttttcagtattaccctcgtagctttccgtgttctttcagccagcgagcagtgcggttaatgctttcatccaaagaaaccagcgagcgatagcccaattctttttctgcccggcgggtatccaaagtcagatcgaagttgagcttggcgacgccgtagtgggtcagaaccggctctttttcgcttttattccccattctttccatggtacgcgccatcacgtccagcattggatagggaatcgaacgaatgcggcacggcatatccagcgcgtccaacagctgctgaacgatggtgcgcagcgggcgcggctgctgattggtgatattgtaagcgcggccagattcggtggtggtggattgcgtcgccagccacatggcgtgaacggcgttctccagataggtcatatccaccaacgcttcgcccccgcgtggcaataacaaggtgccgtagtgcttaatcatgtgtaataagcgcggtagcatcactttgtcatgcggaccaaacagcccctgtgggcgcaaaatggtaaagtgggtttgcgggttagacagagccaactgccggatcacttcttcccccgcagctttactgcgggcaaattcgttagcaaaacgcgccggtcggaaatcttcctgaatatttcggtgatggtgataatcgaagtaaatcgctggggaagagatatgaataaaattctctaccccgtaagcggttgcccattcccccaaacggcgagtcgcgcggacgttcgccagttcaaaagcctgctcggtaccccaaggggaagtgaagctggagcaatgccagagcgtatcaacatcggccagcatggctttggcctgcgatgaaaccagattcgttaaatcggcatgaataaattcagcgcccattttttccaataggctacccatggcctgattacgaccggttgctgtcactttgataccttgacggcggagatattcaacggcgtttcggcctaacccactggttgcgccggtgaccaataccttcataacgaattcggttcccaccaaaaatcagagtgctggcggcaatatcatgcgcgcagcaaataaggtgccattctttcgtgaaatgatgcgctatgcaatcagaaagggctgactaagggttgcaaactgtgtggttgatcgacaaatgcgcgctatttgtgcgcttcccgatcgtattgctcggccagttgcgcaattctcttcgccatgccacgaaaaataaacaggtgagcgggcatcataacgaaccaatacagcagtccgctgaagcctgccggatgccaccaggcccgaacatcaaagcggcgtttatcccctaaatctttgatggtaaaggtcagtcgccccaatcctggcgctttcataccaaacatcatggccagttgacgcagtggttttatcgtaatcaccttccagccatcgactaaatcacctaattccagcgttggtcggtctggtcggccgtaaacgacgcctccgcctgccagatcgtccatccaggcgcgggttttccacagcggattaccgtaaaaatagccttccgggccaccgatttgctgcacgacatgccacaaagcttcgctggaagctgtggtatccaattggcaaccggcctgtttgggatagaagccgtaaccgggacgccagcgggcgcgggcttccggatcgtaaccccaatcggcggagtcaacgactttgtcttcctgccgcagggtttcccgcaccgcatcgtcaaagctgattaaattctgcggtattaatgcctgtaacggagcgccgtctgcgggtaagtcatgattcaagccctgaatcaatgcgctggcaatactggtcggcaccgaggtaatcatgctgataaaatagaccgaaataaaacgggtcggcagcggaatcgggatcagccagcgacgtttaccgctaatggcaataaagcgctcaaacagggtctgataactgatgtattccggtccggcgacgtcaaaaatgcggttttcatcagagggataattcagtatttccgttagataaactaataggttatccagcgcgataggggatgacttggagcgaacccagcgcggcggcgtcaaaattggcaggttgtacaccatatcgcgcatcacttcaaaagccgctgaaccggggccgacaataatgctggcacgtaactcagtgacaggtacgccgctttgtcgcagtaaatcgccagtcaattttcgggcgaccaaatgtggggaactgttttcctccggttgcaatgctccgaggaatatcacctgttttaccgaggagtttttcagcgctagctgcaagttactggcggcctgtcgctcctgttctaccaagtcctcgccgtcgcccatggcgtgaaccagatagtagagaacgtcaatatcctgtagtgcgtgacgtagggtctccggctgatacagatcggcaaaacagcagcgaacattcggccactgttgttcttccagccattcaattcgacgtgcagcggcggtaacctgatgcccttgctggcaaaggcgtggaattaaatgctggccgatgtagccactggcacctaacactaagattcgttgtggtgtcatgatagtcactcggtaaggttggcggtaacagaatcgatatcttgggctgtttctgccgaaatagaaatgccctggcgacagaatatcaccaaggcgacgtagacaaaaaatattattaatttcagttatgtaatgtcaaaaactcataccacagtgcaaccactcgttctaaatcacttcggctaacgtccaaatgcgtaatcatgcgggtcactggcccggcgctgattaacacgccgcgctcacgcatccacggccccatttgggccgccagctctgccgactggcgaatgtacaatatattggtttgagcgccgggagcgataatctctacgccgatatcccgcaacttttgctccagccacactgcgttgtcgtgatcctgctgcaagcgctccacgttatgctgcaaggcgtaaagtcctgcagccgccagaataccggcctgacgcataccgccgccggttattttgcgccaacgtatagcgcgcttaacgtattcttcgctgccgcacagtaaggaaccgaccggtgcgcccaatcctttggaaagacagagagtcagggtatcgcaatactgggtgatttcccgtagcggaacctttagcgccactgcggcattcataatgcgcgccccatcaatatgtaaagccagatttttttcgcgggtcaacgcccatgcctgttgcagataactgatgggcagcacgcggccgctgtgcgtattttccagactgagcagacgggtttgagcaaacagaatgtcatcaggtttgatggcggccagtactttatccaacggcaaactgccgtcgtcattggcatccagcggttgcggctgaatactgcctaaaaccgctgcaccgcccgcctcgtacagataattatgggctttttgtcccacaatatactcatcgccacgctggcagtgcgttagtaatgctaccagattggcctgagtcccgctgggtaagaataatgatgccgctttgccggagagccgcgctccctcggcttccaacgccttgactgttgggtcctcgccgtacacatcatcgcccacttcggcattggccattcgctgacgcatggcaggagaagggcgggttactgtgtcactacgcagatcgatatacatatcgtgaaagctcttgataaaggaaagtcgcgagggcaggatgagtaacctcacagggtagccgtcggttattttcccctgaaatcgttagtatctggccggataaaagtttacccgtgccagaccttgatcgctatcatatgtcacaagatatatgtcacaagacaaagtgtggtacggcaatatctgacatgtgaccgactcattgattaacgtagccagttggttttggccagctcaaccacttcatccccgcggccattgataatggcgcgcagcatatacaggctaaagcctttcgcctgctcaaatttgatttgcggtggcatggaaagctcttgcttggcggtaacgacgtccaccaataccgggcctggatgggcgaaagccgtttccagcgcgctgttcagctcggatgctttctctacccgaatgccttttattcctgccgcattggcaatggcggcgaaattaggattgtgcagatccgtgccgtcggtcaggtagccgccagccttcatttccatagcgacaaaacccagcacgctgttattgaacaccacaattttcaccggcagtttaagctgcgccagtgatagaaaatcgcccattaacatagtaaaaccgccgtcgccgcacattgctaccacctgacgttctggtgccgttgcttgcgcccctatcgcctgcggcatggcgttggccatggaaccgtggttaaacgaccccagtagacgacgtttaccgttcatttgcagatagcgggcggcccagaccgttggcgttccgacatcgcaggtgaaaatggcgtcgtcggtcgcataatggctgatttgttgcgccagatactgtggatggatcggctgatcgtcattggctgtcgccagtccatccagatctttacgagtggttcggtagtgttccagcgctttatccagaaaacgccggtcgctttttacctgtagttgaggcaatagagcgcgtagggtcgttttgatatcacccatcagcgccctattcaccgggcagtgagcgccaatgcttccaggattaatatcgatttgaataatgttagcgtgagtaggataaaaggcccgataagggaactgagtgccgagcaaaatcaacgtatcggcattcatcatggcgtgataaccggaggaaaaaccaatcagcccggtcattccgacgctatagggattatcccactcaatatgctctttgccgcgcagcgcgtgtaccaccggtgcttgcagcatttctgccagtttcaccacttcgtcatgggcgtcggcgcagccgctaccgcacatcaacgtaatgtttttagcggaatttaaggtttcagccagcgcttccagttcgctcatcggcggctgaattagcgggtgttttggggtatgccagaccatcggcgcatcttccggcgcggcttgcagtgctacatcgccgggaagcacaatcacagaaacgccgcgattaaggatggctttgcgcatggcgatttccaatacgcgcggtaattgctcaggatttgtgactaattcgcaataatgactgcattcgcggaacagttcctgcggatgcgtttcctgaaaataaccgctgccgatttcactggagggaatatgtgcagcaatggccaaaaccgggacatggttacggtgacaatcaaaaagtccgttgattaaatgcaggtttcctggcccgcaggaaccggcacaaaccgccagttcgccggttaactgcgcttctgctccagcggcaaaggccgcaacttcctcgtgacgagtacctagccattcgatggtgcccatgcgatgcaaactgtcacttaatccgtttaaagagtcgccggtgacgccccaaattcgtttcacgccagcgagttccagcgttttagccaccagtgttgctacggtctgtttcatacttcccccaagatttaatcgcgatgcttttattccaggaggagaaagtatggtctgtttaagagttaatgccctattaaccggggtttatattgtgtaatagggcattttttgttgtcgtcaggccaattgggtatcgccctgcaattgacagctacaggccaacacgtaaccctgagcgatttcttccggcgtcagcgtcatggtgctggtggtcgtgtaattaccggaaatgattcgagttttacaagaaccgcagacgccagcacgacaagccgcggagacaggcaccttattttcttcaagtgcgaacagtaaagacgcgccgaccggaactcgcagttggcgtagcgggcgattaatggttaatgtcagttggttgcctgactgtggtttttcttcttcgatgtggaactgctcttgctggaaacgttctggcggtacctgttgctcacggcaataattttccacccacatcctataaggcgcggggccgcaggtcatcactcggcattgtcgaatatctggcgcgattttctgcatgatttccgcagaaattctgccgctgaaaaaaccttctttagcccccgattctgccatcaaagtaatatgtaaccgcagcgggtgggcttcaatcagcgcctgccattcagcggaaaaaataacgtcatctggggtacgaacgttaaaaatcacccgaatatcggcctgcggtcggtgggctaacagccagcgacacatcgacataattggcgtcacgccgcatcctgcggccagcattaaataacggtcatcctgattatcggcacaggtaaattccccctgagcgtcggatagccacaggtaatttcccggctgtacctcttgagttagccaacgagaacccgtgccgtcgggcaggcaacggatagtcaaacgaataaagcggctcaggcccggagaagaggaaagggtataggcgcgcagggtatcttcactgttgcgaatactcaccaacgcatattggcctggttgatacggataaaaatcgtggttgattaattgcaggctccaaacatctggcgtttcctgcacaatagagtgcacctgcatacgattagggcacattggtgttggcatcgtcatagcaaaccctcgtggttgcgcggtaatagaaacggtcagcgccggaggcgaatagcgctgaccgcaccgtggcttaggccaccagaatttcgttcaaatcttgttcaaccgaggtgatcgggcgcataccgaatttttcattcagaatggccagcagattatcggtcaggaagcccggcgccgttgggccggtatagatatttttgacgccgagagacagcagcgtcagcaaaatgacgatagctttctgttcgaaccacgacagcaccagacttaaaggtaagtcgttgacagtacagcctaattgctcagatagttttaccgctagcatgatcgcggagtaagcatcattacattggcccacatccagcagacgcggtaaaccttccagcgtgccgaagtccagtttgttaaaacgatatttaccacaggccagagtcatgattaggcaatcttgcggaatattgcgggcaaaatcggtaaaatagctgcgttcgtcccggctgccgtcacagccgccgaccagaaagatatggcgcagttttttacgagaaaccagatcgataaccgtatccgccgaatttaatagagtctggcgaccaaaacccacggtgatcatgtgttctagctcgttgtacgggaatccggccatacttttcgcttgcgtaataacatctgagaaatcatcgccttccaaatgattgacgcccggccaaccaacaatgctgcgggtccagatacgatcgccgtaattacccacgttgggatcgataatacagttggaggtcatcactatcgggccggggaatttggcaaattcgatttgctgattttgccagccgctgccgtagttacccaccagatgcgggaattttttcagctcgggatagccgtgtgctggcagcatttcgccatgggtgtacacattgacgccttgtccggcggtctgctccaataacatctgcagatctttcagatcgtgccctgaaatcagaatggctttaccggcgaccgggcgcacgttgaccgccgttggctgcgggtggccgtatgcctgagtttcgccgctgtccagaatcgccatcacgttgaagttcatctggccgatgcccatagcattattcaacagggtatccacatcgcgcggctgagtgcccagccatgacataagctcatgatattgcgcgtagatattttcatcagactgaccgagtacgtgagcgtgttccatataagccgctgcgcctttcaagccatacaaacacagcatccgcagaccgtgaatgtcatcgccaacctcggctttatcactgtttaaagcgaactgttgagactgttgttgcagtgttggaatgtcgttagcttccaattgtaattcggccatcgggtgatctaccgaggcgctggcatccagcaagcggcagcgtgcggccagagaatcacgcagtgcgatagcttccttggcataaccgacgatgcgctcagaatcaaagttaacgttggtcagcgttgagaaaaaggctctgggtgcgaagctatcgatatctggatcgataataccgagctgtctggcgcgtaatgcccaagcggaaagcccctgtaatacggcaaccaacaggtcttgcaaatcggacgtttcagcggttttcccgcacataccctgagcgtaagagcagccattgcctgccggggtacgaatggtttgttcacattgcacacagaacatgattctttccttttaaaagtgcatttgtaatgcgtgtttaaaagcatagatgtgccaaggcatcttaaaaaggcttttgtaatgcaactttaacttatcttgatttggcgcaatttttgtcgcgaatgagactttttcgctttaatggtgaaatgaatagaatttagcgggccaatacattagcccgctggggacggagaatatcaggagaatagcgcgatcagtactggagccagtaagctcaatatgaagccgtgcacgatcgcggcaggtaccatttccaggccaccgctacgttgcaataccggcagggtgaaatccattgaggtggcaccgcagaggcctaaggcagtggaacggctgcggcgaaccagcgttggaatcagcataatggcgactaattcacgggctaaatcgttgaagaaggcggcgctgccgatcaccgggccaaatgcgtctgtcagtaagatacccgagagtgagtaccaaccgtagccggaggccattgccagaccggttttcagcggtaaaccgaggaataacgcggctaacgcgccgccagccagcgcactgacagcaaccacgatggcgacaatagtgccgcggcggttaagcacaatctggcgtaaagtcatgccgctattacgcaactggatgccaaccaaaaatagcaggaatatcaatgctaattcactaccttgagcggcaaattgcaacggtggccattcggtcagacccaatagaaagccgatgataactacgccgcacagtttcagcgattccagcgccatatgtaatcgggaaggcagagcttcctggcggtgagtatttttccacggccttttatgttcgagcaaaaatagcgccaacaggttagcggataaaatgcagataaaacatacgctggcgtattggaaaataagcagcaggtttgcgctaaggttttccagaaatgccaagctgatgcccataaaaaataaaataacgtaaaccatccagcttaatagccggttaatcgcctgaattaaagatttacggctaagcgggatcaaataaccgataattaacggcaacagaatgatcagtaatcctgaatacatgtgagttaaagcgtcctttacgcgtcaggctgaattaagcagacgtaaggctatagccggttggctatagcaatgagatcgggcattgttgagtgaaggggataagctatctaaaaaggcggatagagtaaaggtggaaagaccggcggatggcgcttgacctgaaaggattttttgcgccattctcatgaatgttaacgcgttaatgacataggcttcgctggtaatgatttaacttcgcacgggaggcgtaaatatgttcctagaacgcgtggaaatagtcgggtttcgtggcattaatcgtatttctttgacgctggatgataatacggtactcatcggggagaatgcctggggtaaatccagcctgttggatgcgctcactctgttgctgtctccggaaccgcgactctatcatttcaccgtgcaggatttttattatccccccggtgatgaagcggcaaaagatcggcatcttcaggttattttaaccttctgcgagaaggatatcggccattggcgttccccacgttatcgccatttggcaccgctgtggagccaatgtgaagacagtttgcatcgtatttactaccgagtggaaggcgaactggccgatgacggcaccgtttgtacctggcgcacttttctggatctggatggccagccgttgccactccacgatattgaaaaactggctttaggtattattcgtatccatccagtgctacgcctgcgggatgcccgctttatccgccgtttacgtaccagcgtgccggaaagtatgcctgggcaggataaagttgcgctgaatcagcagttggatcagttagggcgtgaattagtacgtaatccacaaaaactgactaataccgagctacgtcagggattagacgctatgcgccaattgctggaacattactttgccgagcagggttctcaaacgcctcagcgcaatcggccttcgcgcccgcagccggaacgtcaggcgtggcaagcgctggacagcatcaaccgcatgattgccgagccgaacagtcgaagtatgcggctgattttactggggatgtttaatacgttattgcaggctaaaggctcgattcatctggatccgcacgcgcgcccgctgttgctggtggaggatcccgaaacccgcctgcatcccattatgttatcggtcgcctgggggctactcaatcagcttcctttgcaacgcatcaccaccaccaactccggcgaactggtttctttggtaccggtagaacggatttgccgattggtgcgtgagtctgcgcgggtggcaacttaccgtattggcccgaaggggatgacgccggaagacagtcgccgcattgccttccatattcgttttaaccgcccgtcatcactgtttgcccgctgctggctattggtggagggtgagacagaaatctggttgcttaacgaactggctcgccaatgtggctatcactttgaagctgaaggggtaaaagtcatcgagtttgcgcaaagtggtttacgtccattgctaaaattcgccaatcgcatgggcattcagtggcataccctgaccgacggcgacgatgccggtaagaagtatgccgctaccgttcgggatattgcggagcgcaacggtgataatgaacgagatcgcctgaccatgttgccggcgccggatatggagcaattcctatatcgtgcgggatttggcccggtttatcatcgaatatcagcgataccgatgaatgccaaaatgccgccgcgccgggtgattgagaaagcgatacatcgcacttccaagcccgatttggctattgaagttgccactcaggctggggtgtggggcgtgagttcggtaccgccaattctgaaaaagatgttttcccgcgtggtgtggctggctcggggtcgcgcggattaaccgaggtattttcagcacaagggaagtgggcgctaatcccgctttccaattgatccaataactgataacggcggcgatattcagcgcgtttcttgctagggatatcctcaatggctttccgcgctacgcgggcaggcagcagaaaataaccttcctcgctcatttggccgcccagagattgccagaaaccatcataatcggcgtgtaacttatcgcttttccgttgacgatagcgccagcttttatagatatgagtatcattacccaccgctataatctgagtgatccccaacatttcggccagactacaggctgcttccagcaggatacgtttcgggaacaggccgtgacagtttttggtgctgatttgaatttcttcatgagctacctgcggtgcggctccttgtaacccaccaataaacaacgtttttttctgtcgataactcatcaaactaaaggtcatgagcgccagtgtttcaccttgttgattggtaaacatcagcgtggcttccccttctttattgagcatcggcaacgtaccgaggtaaacgcggtactggctgtcattgcgtccgcttaattcggccaatttataaggcttggattggagatatcccgtcgccaatgctgatggcatcaattcattgaccaaccgatagtgctctttgatcgcctgtaatccctgacgtttactgagattggcgctgagatacggacggtgcagtttgcaaggtaaatccggctgagattgcagcagcgtaccgagctgcgggttattcgccaattcactgagtagcgccagagtaacctgaggataaatcagcgttctggccagaaacttaaagcgaaaagccggttttcgccacacctccggcaggttttcttccccttttatcaactgcgaaattaactgccagcgacttaaatgattcggcgctgatgggggtgaagtgaataaatacattggaatatccgtttcgttatcaaactttgtctctattgaagcaagggggaactaaacagcgactcaatgcgtcttatgttggtattatttatatgatttgatgtttatattacgtttaaattcgcgcactctcagagtgataatttaatcagcgctacggtattttcattagcatttgtctatttcaagcataaattttaataaggtaggtaattaatttgacgtggtttagcggacgtaaacgacgctggattctggcgattgtgattctggcaattggcggtttttgggcgatcaagcatggaatggcaccggctgcgacacagtatcaaaccgtcaaagtggttaatcgggatctgcaacaaaacatattagcgataggtaaattggacgcggtgcgcaaagttgatgtgggtgcgcaggtgagcgggcagcttgaacggctctatgtggagatcggcgataaggtcaagcaggggcaactgctggcgatgatcgatccgcagcaggcacagaaccagatcaaagaggtggaagcgacgctgcaagatcttaacgctcagctgttgcaagccaaagccgagcggcagttggcggaggtgacgctgagccgccagcaacaattggcgaagctacaggcggtttctcttcaggttctggatcaggccgcaacggatttggcggtaaaaaaagcaaaagttggcacgatcagcgcacaaatcagcaaaaccaaagccagcctggatacggccaaaattaatctggattacaccaaaatttccgccccgatggacggcgatgtagtgcaaattactacgttgcaaggccagacagtgattgccgcacaacaggcgccaaacattctgacgttggccgatatgcgtacgatgctggtgaatgctcaagtttccgaagcggatgttatccacctgaaaccggggctgaaagcctcattcactgtattgggtgatccgtcgaagcattttgacggtgtactcaaagatattcagccaacgccggaaaaagtgaacgatgccattttctattcggcccgctttgaagtacctaatccggatggcctgctgcgcctgcaaatgaccgctcaggtatcgattcaattatcgaaagtggaacaggctaaagttgtgccactctccgctttgggtaacgaattgggcgtgaaccgttatgaagtcgcggtgctaaaaaatggtaaggaagagaaacgagaagtgaccatcggcattcgcaacaatgtggatgcgcaggtgcttagcggtctggaagtgggtgatgaagtgattaccagccgcggcgtagcggaggctgaataatggcggctttgcttgagttaaaaggcattcgccgcagttatcagtctggtgaacaaacggtggatgtgctgcaggacgtttcgctggaaattaatgcgggtgagctggtggcgattattggtgcttccggctcgggtaagtcgaccctgatgaatattcttggctgtctggataagccaagcgaggggatttaccgcgtggccgggcaggacgtcgatagcatggacaatgatgcgctggcggctttgcgtcgtgaacactttgggtttattttccagcgttatcatttattacctcacctaagtgcggcgcataacgtagaagtgcccgcggtctacgcaggtttaggaaagcatgagcggcgggaacgcgccaaaatgttgctaacccgtttgggattaggcgagcgcatcagctatcgtcccagccagctttccggtggccaacagcagcgcgtcagtattgctcgcgctttgatgaacggcgggcaggtaatattggccgatgaacccaccggcgcgttagacagccattccagcgttgaagtgatggtgattttaaagcaactgcaacagcaggggcacacggtcattattgttacccacgatcctacggtcgcggctcaggccgagcgaatcattgaaatcaaagatggccgtattatggcggactccggcagtaaaacaccgccaaaaaccgcagagccggatacgcaaagtctgacgccgccagcgccttcatggcagcaattgaccgggcgttttcgtgaagcattgctgatggcatggcgcgcgatggcctctaacaagatgcgaactgcgctaactatgctcggtattatcataggtattgcttcggtggtttctattttggtggtgggcgatgcggccaaacaaatggtgttggcagatattcgcgctatcgggacaaataccatcgatatttaccccggaaaagactttggcgatgacgaccccagtaatcggcaggcgctggtttatgacgatatggtagcgctgaaagcgcagtcttacattaatgcggtgtcaccggtgatctctggcagtatgcggctacgcttcggaaatatcgatgtggccggcagtgtatccggagtgagcgcgcagtatttccgtgtttacggtatcagtatcgagcagggcacggcgattacgcaggatcaggtcgatcgacaggcgcaggcggtggtgattgaccgtaatactcagcgccgacttttcccgcatgtgaaagatgtggtggggcaagtgatgctgatcggcaatatgcctgcgactatcgtcggcgtggtggaagaaaaacaatcgatgtttggcagcagtaaatcactgcgggtgtggattccctacaccacaatggctaaccggttgatgggtaaatcttattttgattcgattacggtgcgaatcaacgatggctataatagtaaggaagccgaacaacagttagttcgcttgctaactttgcgtcacggtaagaaagatatctttacctataatatggacagcttgctgcaaactgcggaaaaaatcactcgaaccatgcaattgttcctgacgctggtagcggtcatttcgttggtggttggcggtattggtgtgatgaatattatgctggtatcggtaacggaacgaacccgtgaaataggtattcgcatggccgtaggggcgcgttccagcgatgtcatgcagcaattcctgattgaagcggtgctggtttgtctggtcggcggcgcattagggattacgctttcctttgctatcggtctggcggtagaaatggtgatgcccaactggcaggtatctttccctgcggttgcgctggtcagcgctttcctgtgttcgacaattattggcgtggtcttcggttatttgcccgctcgcagtgccgccagattaaacccaattgacgctttggcgcgggaataacgtttacggacatagaatttacgggaaataggataaacgagcagacgcccaggcggtgttaacgtaatattatggcgttagcgggggcataaaaaatgataaaaatgccagtcgcagttcggctggcattttgaattgctgtgctgccgtagataaaagctaacggcccgacggtgtgacgttgatgtcaggcgagagccagcatttccagaggcacaatcaggctggcatgattgcctttggggccctggtggacatcaaagttaacctgctgacccgcttttagcgttcgataaccatccatctggatagtagagtagtgtgcaaagatatcttcgccgccgttctgcgggcagataaatccaaagcccttggcgttattgaaccatttaacagtacccgtctccatacttctacgttcctcgcaaggctattctaattttagatgaggtaatcgctggttaaagtgagcgcggattggttaaaactccatcagctcacaaatttacactctagtggaaatgcgattaacgtcaagaggacggcttttctcaggctgaggagttcgccaaagtttgatgcagataacgctattgcgcttatttagttacaattttgttgttgtctgtgcgaacgttctcgcatgcttctaaagcgacacttcacggcaagagatgttaaaataacaatagaaatctgtaccaaatggtcttataaccggagctgagtgttgctcctgtatgattcagtgaaacgatgggtaagcaatgggcaataacaacgactggcttaattttgagcatttagtcaaagataaacaaatcgatgcgctaaaaccgccgtctatgtataaagttatactcaacaacgacgattacacgccgatggaatttgtgattgacgttctgcaaaagttcttttcttatgatattgaacgtgcaacccagttgatgctgaacgttcactacaaagggaaagcgatttgcggcgtgttcactgctgaagttgcagagacaaaagtggcgcacgtaaatcaatacgccagggagaacgagcatccattgctttgtacgctggaaaaagcctgattaaggcaatttattggggaggtgcctatgctcaatcaagaacttgaactcagtcttaatatggctttcgccagagcgcgggagcacagacacgagtttatgaccgtggagcacctgttgctggcattgctgagcaaccctgccgcgcgggaagcgctagaggcatgtacggtggatctggtggcattacgccaggagctggaagcctttatagaacaaaccacgccaacgttaccggccagcgaggaagagcgtgacacccaaccaacgctgagcttccagcgcgtattacagcgcgccgtcttccatgttcaatcatctggtcgtaatgaagtttccggtgccaacgttttggtcgccatcttcagcgaacaagagtcccaggcggcttatctgctgcgtaaacacgatgtcagccgtctggatgtggtgaacattatttcccatggtgcacgcaaagacgagccgggtcaggcgccaaatgcagaaaatccggtgaatgaagagcaggcgggaggggaagaccgtatggagaacttcaccaccaatcttaaccaactggcgcgcgtcggcggtatcgatccgctgattggccgcgaaaaagagctggagcgtgcaattcaggtactttgccgccgtcgtaaaaacaatccgctgctggtcggcgaatccggcgtcgggaaaaccgcgattgccgaaggtctggcatggcgaattgtgcagggcgatgtaccggaagtcatggccgaatgtacgctgtactcgttggatatcggctcgctgctggcgggaactaaataccgcggtgactttgagaaacgtttcaaagcgctgctgaaacagctagagcaggataaagacagcattctgttcatcgatgaaattcacaccattatcggcgccggtgctgcttccggtgggcaagtggatgccgcgaacctgatcaaaccgctgttgtccagcggcaagattcgggtgattggctccacgacctatcaggaattcagcaatatctttgaaaaggatcgtgcgttagcgcgccgtttccagaaaattgatattgttgagccgacgcccgaagaaacggtgcaaattatcaatgggttgaaaccgaaatacgaagctcatcacgatgtacgctacacggcgaaagccattcgggcggcggtggaattgtcggtgaaatacatcaacgatcgccatttgccggataaagccattgatgtcattgatgaagctggtgcgcgcagccgattgatgccggcgagcaaacgcaaaaaaaccgtcaacgtttcagatattgaatctgtggtggcgcgtattgctcgtattccggagaaaactgtctctgccagcgatcgtgacgtactgaaaaacctgagcgaccgtttgagtatgttggtcttcgggcaagataaagctatcgacgctctgactgaagcgatcaaaatgagccgcgcgggtttaggtcatgaaaataaacctgtgggttcgttcctgtttgctggcccgaccggggtgggtaaaactgaagtcacagtgcaattggccaaggcgctggatatcgaactgctgcgctttgatatgtccgaatatatggagcgccatacggttagccgcctgattggtgcgcctccgggctacgttggctacgatcagggcggtttgctgaccgacgcggttatcaaacaccctcatgcggttctgttgctggatgagattgaaaaagcgcatcccgatgtctttaacctgttattgcaggtgatggataacggtacgctgacggataacaatggtcgtaaagcggatttccgcaacgtgattgtggtgatgaccaccaacgctggcgtgcgggaaactcagcgtaaatcgattggcttccaacagcaggataacagtaccgatgcgatggaagagatcaaaaaggtgtttacgccggaattccggaaccgtttggataacatcatttggttcaaccatttgtctcctcatgtgattcagcaggttgtcgacaagtttatcgtcgagcttcaggcgcagttggatgccaaaggcgtgtcgctggaggtcagcgatgaagcgcgtaactggctatctgagaagggctacgacaaagctatgggcgcgcggccgatggcgcgggtgattcaggaaaatctgaagaaaccgctggctaacgaactgttgtttggctctttggttgatggcggctcggtgagcgttggtctggataaagagaaacagcaactggcttacgaattccaaagcgcgcaaaaacgcaaaacggaaggcgcggtacattagtcttagcgcaataagctagttgaatcagacgtgaaataaatggaagggcgatagcgatatcgcccttttttttgtactcagtccgactcattcgaaatgggaatggtgcggaaggggtaaataacagaaaaagcaaaacgccctagccaataaaatggtaagggcgccggaggggggactacatcctcagagctcgctagcaactagcgactgggcagccgattaacggctacggaagacaatgcggcctttgctcaggtcgtacggggtcagctctacagtgactttgtcacccgtcaggatgcggatatagtttttacgcattttaccggagatatgagcggttaccacgtgcccgttttccaattcaacacggaacatggtgttcggcagcgtatcaagaacggtgccctgcatttcaatattgtcttctttggccatcgaatcctctaggagtaactaccttagtttttaaccggcaagataatgccgaaaaacccacattatgtaaagaagtgttggcagtcatcacaccatttctgcaaaattagtctgctgaggaggggataaagcctaatgtggggtgcttttgtaacattgatctttacggcatcgcgatttcgacatccagcgattgcggtaaccagcattcagccggtagcggactaaactggagttgactcaagtgctgcaaaaagtggctgcgagggatctctctcgcacccagcgacgcagtgtgagcgttgaggacctgacagtcaatcagttctccaccatgacgggtaaaatgatgacaaaaagccattaatccgctttttgaagcgttctccacccggctaaacattgattctccgcaaaaaagtgcgcccatcccaataccatacaacccgccaacgagttcattatttaaccatacctccaatgaatgagcgtggcccatttcatgtaattgggcgtaggcctgctgtacatcgtcaccaatccaggttccgtcatcgggacgatcggcgcaggcggcgaccacttcacggaacgcctggttcagtgtgaaccgaaatgggcagcggcgcaggaagcgacgcatgctacggctgatatgtaattcttcggggaacagcaccgctcgcgggtccggcgaccaccataaaatcatctcgcccgggctaaaccacgggaaaataccgcgctgataggccgcgagtaaccgtgatgccgataaatcgccacctaacgccaataggccattaggctcgcgcagagccagctcaggtgaagggaacgcgtaagaatgtgatgagaggtgggtaagacgcataaatccccttaacggcgcttacaggcgcttttggctgtagagtattgataatgccgccgttatcccagcggcatttgataacattagccagaaatcgtcttaaactcacaataaaacttagcggcgctgacggaactgataataccggcctttatttttcaataaagtctcatgatcgccctgttcaacgatctggccgccgtccatcacgcaaatgctatccatttgctccagcccatacaggcgatgcgtcaccagaatcagactcttgtgctgacagtgttggcgcagcagcgccagtatttgttgctcggtttccgcatccagaccttcggtcggttcatccaacaataacaatggagcaggatggagcagcgcccgcgcaatacccaaacggcgttgttcgccaccggaaagtgggcgaccgccgtctcccatccaggcatttaacccttcgtcattatccagaagattacccaggccgacttgttgtaacgcggtgattagttgctcatcgctagcggttgggcaggcgagcagcaggttttgtcgcagcgtactgctgaaaacgtgtactcgctggctgactaccgtcatcatctggcgtagagaagcttcgtcgtagctcgccagcggctggccgttgagccggatttcaccctgattgggatcccaggcgcgggtgagtaattgtaatagcgttgatttaccacaacctgtgcgtcccagtagcgcaatatgctctcctgcggccagtgacagcgttatatcctgcaatacaggcaaaggctggtctggataggtaaaactcacctgtgcgacttccagcgctgcctgtgaagcgatctcagggccggtttgggggaaggtgacttccggcttctgtgcaataagctgcgccacgcgctcagcggaagttatcacctgcccaagatgctggaaagcacctgcaaccggcagtagagcctcaaatgacgccatcgaagcaaaaacaaacagggcaatcaatgcgcccggttggctataatcgccgacgccagccgcggccagccacagcattagcgtgacggtcatgccggtcgccagaatcatcaatgcctgcgccaaacctgccagcgaagcctgttgctgctgacgagtcaaccaacgccgttcgatatcttccaaagtatggcgaaaacgtcctaacgcgccgaagaccaacagttcggcctgaccttgcagccaggcggtcagttgtgtgcggtagtggctacggaatacggtgagatcggcaccgataggttgaccggcgcggtagaaaatcagcggcagaattagcagcagccccagtagaatggcacctagggtcaatgccagctcgacatcaaggaaactcagaccgaaggtaacggcagcgatgatcgccagcgcggcgattaacggcgaaatgacccgcagatacagatgatccaacgtatcgacatcagccaccaagcggttgagcacttcactctgacgaaaacgggcaatcccggcaggggagagcggtaaaatgcgctgaaaggtaaatacccgcaaatgcgccagcacccggaaggtagcatcgtggctcaccacgcgctcggcgtagcgtccggcggtgcgtaaaatggctgaaccgcgaacgcccgcggcgggaagcaaatagttaaaggtatacaaacccggcgggccagcgagtgcagtaccagcgaggaaccagccggacagcgtcaataggccaatgctggccagcaaagtaataatagccagcaaaatgccgaggctaatcaagaaccaatgacggcggtaaagcgccagaaatggaagaagcacgcgcatgattaaagctcctcacggcgataagacagcaggttggcgaaaggcccctcagactgactcagtgtggtgtaatccccttgctgaaccagcagcccgcggtccattacccagatttggtcataatctagcgtatcttctaactggtgcgtcaccagtagcgtagtctgcattcgcgaagcctcgtttaatgctttcatcactaattgttcgctgtgggcatccagactggcggttggctcatccaacagcagtagccggcaaggatttaacaaggcgcgcgccacggcgacgcgctgtgcctgaccaacggatagacgagccgaatgatcgccgatttccgtggctaacccgttgggcaaatccccgaggaactcattgacgtaggcacgttcaaccgcctgttgcagctgctgttcgctggcgtcgggctgattgagcagaatattgctggccaaagtctgctccggcaaataagggttttggcctacccagcttagctggctgcgccatgcctgaggggcaagttcgcgcagttcaatgccgttaacccgcagagagccacgataaggcagaaagcccagtaacagattgagtaatgagctttttcctgcgccactctgcccaacaatggcaatgcgctggccgggttgtagcgtgaaattcaacgggccagccaggcgagtgccgttgggtgccagtatttccagttcggcggcttccagcgtgattaaaccttcgtcgggtaggtttttatccccctgaccgatagcttcgccttcgctggcgaggaacgtcactaatgattccgccgcgccaacggcctgcgctttggcgtgatagaaggtgccgagatcgcgcagtggttggtaaaactcaggagccagaatcagcaccagaaaaccggcaaacagggtgacgcccaatccgtagctgccaaaattcaattcgccaagataggaaaaaccgaaataaaccgcgacaacggcaatagaaatagcggcgaaaaattcgagaaccgccgaggaaaggaaggccatgcgcagcacttccatggtccggctgcggaaatcttcggaagaatcacggatttggtcggtttcggccttcgcccgatgaaataagcgcaaggtgtccaaaccgcgcaagcgatcgaggaaattgccgctcaatcgcgccagtgcaacaaagttgcggcggttagcatctgctgcgcccatgccgactagcgccatgaaaatcgggatcagcggagcggtgacgaacaaaatgagtcctgcggcccagttaatcgggaaaatcgcaatcaaaatcaacagcggaatcagaccggccagatacatttgtggtaaatagcgcgaatagtaatcctgcatttcctcaatttgttcaagaataatggtcgcccaactgccggctggtttgccttttacccaggatggcccgagttgttcaaggcgatccagcacgattttacgaatctgcaatcgcaccttcatgccgcagataaaacctacccgctcccgtagccaactgaccacggcgcgcgctgcgaaagttccagccagcagcaagaagtcgttggtcagagcctctcgcggcatctgatccataatcagcgcctgcaataatccggctaataaccaggcttgagcgatgatcaataacccgctgagcaaaccaagtagcatggaaaggcggagccaacgttgcgcgggggcgctttgttttttcagccaacgaatcaactcatattgtcttgttttattcatcaggcaattattctgcgcaggaaatgggatgataaatttatcaatagatgtctgctccccgaagagggcaaaccggcgaaaggcaatgttaccttgtccctacgccttgtgaaaacaaataagggggaaatagtggttttaaacaagtttaagaaaaatacaggaagaggttattttgatttacctcattgattgtaaatcaaaaagtagaaatgattcgttttttggtttttatttcatcgattattactgaaaccaaccaatcacaattaaataacaagtgattgacatggggagtggcgagttaaataggttttttgcactgttattttatattgttgccaactgtatctttactttttaattaaacggattgcaggtaatccatgaggcttggccgttttgaacgcacgaacaactcggcggagatataaataaagtgaagccacgaataaaaaggcgactcatcttgcgattgagccgcctgtttcttcgagctagcctgagtcgttcttcaggccgggtcgattacttatcgttgaccaagccgtccagataacgctccgcgtctaacgcagccatacagccggtgcccgcggaggtaatcgcctgacgataaatatgatccatgacgtcgccggcggcaaatacgccaggtacggaagtctgggtcgcgttgccctgaatgccagactgcactttgatgtagccgttttcccgttccaactgatcgccgaaaattgcggtgtttgggctgtggccgatggcgataaatacgccagcaactgccagttcttcggtttcatcggtttgggttgaacgcaaacgcacgccggtaacgcccatttgatcgcccaacacttcatccaaagtgcggtcggtgtgcaacacgatattgccgttcttcactttttccatcagacggtcgatcaggattttttccgaacggaaagtatcacggcggtgaattagatgtacttcttccgcaatgtttgccagatataacgcttcttcaaccgcagtgttaccgccgccgactaccgcgactttctggccacgatagaagaaaccgtcgcaggttgcgcaagcggaaacgcctttgcctttaaaggcttcttcagattccatccccagataacgggccgatgcccctgtggcgatgatcagagcatcacaggtatattcttcgctatcgccgaatagacggaacggacgctgttgcagatcgactttattgatatggtcgaaaagaatttcggtttggaatttcgctgcgtgttcgtgcatacgttccatcagcgccgggccggttagaccttctgggtcaccgggccagttttcaacttcggtggtggttgtcagctggccgcctttttccatcccggtaatcaaaacgggcttcagattggcgcgggcggcataaactgccgcggtgtaacccgcaggacctgaaccaagaataattaatttgctgtgcttagccgtgctcatgaatacctctttcccacaatggcggacaatgttagggattgtagggaaaatgtgacagtaaaaaaagcgaacaaaaatgttgttagcgatttgtttgataggtgatgactattttctcagcgaaatgcattaagaataagcagttaggagagaaacctatcggatggggcttttttaatcgcggctacatttgctctcggacatggctgtccgcaagtggttggccttaaccctacgaattttgtgccctcatctgtcacttccacccgaattcagcggaattttctctctgaacatgaggtaaaaaaagcgtaaaaacgaggggaaaatgagcgagtgagattttttatctggcacgttctactgatttaacttcttttactttgacaatcggctgtgcatttgcgaaaacatcataggaagaagaaattatctgcgcgccataatttcagaattggtatcactgatatcaatcgaaaaccctggaacgttttcgattaatgctgggtggctacgtgcagtgatttctcggtatcgttggaaaacatcccattcggcaccgcgatgttttcatctctttcgggacgctaataatcatcgagtacctcgcatgcggttggacagacagggtgtgagataggaacatgttgatatatttgcacaaaaacaggctgtgggtctttgtctgtggcaggctcagaacaccgacttccggttagggcatgtggcggattcaaggaaattaagagagacaataagatgatagacaataagaaacgcccggggaaggagcttgaccgtattgaccgtaacatcctgaatgagcttcagaaggatggtcggatctcaaacgtagagctttcaaaacgtgtaggtttatcgcctacgccgtgtctggaacgtgttcgccgcttagagcgccaggatttcattcagggctacactgcgctgttaaatccgcaatatctggacgctgcactgttggttgttgttgagattactctgaatcgtggtgcgccagatgtgtttgaacaatttaacaccgcagtgcaaaaacttgatgaaattcaagagtgtcacttggtttccggcgattttgactatttgctgaaaacccgcgtgccagacatgtctgcctaccgtaaattgcttggtgaaaccttgctgcgtctgccgggagtgaacgacacccgtacttacgtagttatggaagaagtaaaacagagcaatcgtcttgtgatcaagacgcgctaaacgggcaggtgcaaaacctgagtaatttggttacactcctgtttattcatacagtttcagcgccgggaaggtttctcggcgttgtttctattaccaattcacaggacctggagagcctttcttgagccaggaatatacagaagataaagaagttaccctgaagaaactcagcaacgggcgtcgtttacttgaagccgtactgattgtggtaactattttggcagcgtacctgatggccgcgctgatcagtttcaacccttccgatccaagctggtcacagaccgcatggcatgaacctattcataatctgggtggcagcgttggcgcctggatggccgatacgttgttcttcacctttggtgtgctggcttacgccattccgccgatcatggtgatgttgtgctgggccgcattccgccagcgtgatgacagcgatcatatcgactatttcagcctctctctcaaactgatcggcacgctggcgctgattttgacatcctgcgggctggctgcgctgaatgtcgatgatttgtactactttgcttccggcggtgtgattggcagcctgttcagtaacgcgatgctgccgtggttcaacggcgtgggcgcgacgctgacgctgctgtgtatctgggcggtaggcttaaccctgtttaccggctggtcatggctagttattgccgaaaaaatcggtggggtagtgctgggttctttggcctttctgaccaaccgttcccgcagatctgagcgtcaaagagatgaagatgacgattatctggatgccgaaattgccgatgaacccgacgctcaacccggcgtagccgcatcggtcgttgctgcgacaacagccaacgcgagtgatgacgttgatgatgtcctgttctcggcaccatcgctgactaaaatcccaacggaaagtcctggtgaaaatgccgctgttgctccggttatccctgatgctgcgccacagacggcagcagcgccttatgatgatccgcttctgagcacgatgagggcaacagacgttgatgagacacagactcagcatcagccgtgggcttcgacagaaacggcgccggctgaaactgcgtcagcgcaaaatgttagccacagcgcatcgccaatgaccgagaatctggcgacaccgccgctatattccttcgaaattcctgaagaaacaccggcaccgatccgcccaaccgccgagcctgagaaacgtgagccgcaaatgggcacatgggatgccgatccgcagccgtcgccgtttgattttaccgccgctcagcgccacagcgatcgcgtggaatcaacgccttatatgaatcctggtttcggtgacgagtcgggcgctgaaagctcaccttcggctgtcaccggctctattcctgcagtgggtcatggggtgtccacggccgccgcggcaacctttatgccagcgtttaccgctataagtgacagtaactcccagattaaacagggtattggccctgagttgcctcgtcctaaccctgtgcgtattcctacccgtcgtgaaatggcttcttatggtatcaagttgccgtcacagcgcatggcagagcaggagcaacgcgctcgtcagggcgatgagcctcagcctagcgcgccgcaaagtgtggaagcgcagcacgacgaagatgcgttgcaacaggccatgctgcgtaaagctttcgccgatcgggaaaaccagcgctacggtgaaaattatgccgcagagccagagccgcagatcgaaccggaagatgaacaagcgttgcaggacgcggagctgcgtcaggcctttgctgctcaacagcaaagtcgttacgggatatcttctgaatctgagccagtcgtggtgccaagtcgcccggttgatacgcataatgcattcaccttctcgccggttgcggatttggtcgacgatacgccgcgcgaaccgctgtttacgctgtcaccttataccgaagagcccacgcagccggaaccgcagtatcaggctgaacctccagtgcagcagccagccgcacccgtctatcagcagccggtggctcctcagcctgcggcaccagcggagtcggcctattcgacagcccagaatgcgccgacttatccgacggctgctccgcaggcaccggccgcacctcaaccggtaccgcagcctgttcctgctatggacagcctgattcatccgttcctgatgcgtaacgatcagccgctgcaaaaaccaacgacaccactgccgacgctggatctgctggcttctccgccagaagaggaagaaccggtggatatgtttgccttggagcaaactgcgcgtttggttgaagcgcgtcttggagattatcgggtcaaagccgaagtggtgggaatatcgccggggccggtgattacccgcttcgagctggatttggctccaggggtgaaagcttcacgtatttctaacctgtcgcgcgatttggcgcgttctctctctgccattgcggtgcgcgtggtggaagtgattccaggtaagccttatgtcgggttggagttaccgaataaacgtcgccagaccgtctatctacgagaagtgctggactgcgctaaattccgtgataacacttcgccgctggctattgtgctgggtaaagacattgccgggcagccggtggtggcggatctgggcaaaatgccacacttactggttgcgggtacgacgggttccggtaaatcggtcggtgttaacgccatgatcctgagtatcttgtataaagcgactccggatgaagttcgtttcatcatgatcgacccgaaaatgctggaactgtcagtgtatgaaggtattcctcatttgttgaccgaagtggttaccgatatgaaggatgccgctaatgcgctgcgctggtgtgtgggcgaaatggaacgacgttataagctgatgtccgcgcttggcgtgcgtaatttagcgggttataacgaacgcgtggcgcaggctgaagctatggggcgtccgattcccgatccgttctggaaaccaggcgacggcatggatatcgaaccgccaatgctggtgaaactgccatacatcgtggtgatggtagatgaatttgccgatttgatgatgaccgtcggtaagaaagtggaagagctgattgcccgtttggcgcagaaagcgcgtgccgcaggtattcatctggtgctggcgactcagcgtccatcggtggatgtgatcaccggcttgattaaagctaacataccgactcggattgcctttaccgtgtccagcaagatcgattcccgtaccattctcgatcagggcggtgcagaatcgttgttgggcatgggtgatatgctgtatatggcgccaaactcatcgataccggtgcgagtgcacggtgcctttgtacgcgatcaggaagtgcatgcggtggttaacgactggaaggctcgcgggcgtccgcagtacatcgaaagcatccttaacggcagtgatgacagcgaaggcggtagtttagggctggatagcgatgaagaactggatccgctgttcgatcaggctgtcagctttgtgttggaaaaacgccgagcctctatttccggggttcaacgccagttccgcattggttataaccgagctgcccgtattatcgaacagatggaagcccagcaaatcgttagtccgcaaggccataacggtaaccgtgaggtgttagctccaccgcctcatgaataatcgttatcaatgatcggatcatgacgtataaaagggccgcattgcggcccttgagctaaaagataaagcgcgtttaaattgataattaaagcttttcagcggtcgttctaaggtttcaggctacgaccagaaagattggtaacattgacgcacaatcattcttttagtgaatgctgtgcaaagaagcgtaaaccatgctgtttatcagattattgtgctatagctgaataataggcttcggctagagtgcagatagttaattattgaataggtccctatggcaatatttgccggggtaatagcatttacaaggtatttggaatcatgaaaaagctgctcgttgcctgctgtttgctctccagtgttatttccgcctccgctttggccgatgcaagccaggatcttcaaggccgcctgagcaaagtgaacagtttccacgctaagttctcgcagtacgtgaccagcgctgacggcgcggcggtacaagaaggtgaaggcgacctgtgggtaaaacgcccaaatctgttcaactggcatatgacttcgccagacgaaagcgtgcttatctctgacggcgaaacgctgtggttctataatccttttgttgaacaggcgacggcaacctggttgaaaaactcaaccggcaacacaccgtttatgctgattacccgcaataatccggatgactggaaacagtacaatgtgaaacagaaaggcgatgattttgagctgacgccaaaagcgccgagcggtaatctgaaacagttcgccatcagcgtgacgccaggcggcacgatcaaaggctttaccgccgtcgaacaagacggccagcgcagcgcctatgtgctgaaaggccagcaaaacagcacgttcgatgccagcaaattcaagtttaccccgccgaagggggttacgctggacgaccagcgccagtgaggtgtgagtgagtaatctatccctcgatttttctcaaaacgagtttcagccattggccgcgcgtatgcggcctttaacgttggctgaatatatcggacagcagcatttattagctccgggtaaaccattgccacgtgcgattgaagcagggcaactgcattcgatgatcctatgggggccgccgggaaccggtaaaaccacgttagctgaaattattggccgctatgggcaggcagatgtggagcgtatctctgccgtgacctccgggatcaaagagatccgcgaagcgatcgagcgggcgcgtcaaaaccgtgatgctgggcggcggactattctgtttgttgatgaagtacatcgcttcaacaaaagccagcaggatgcgtttttgcctcatattgaagacggtactattacttttatcggtgccaccaccgaaaatccctctttcgaactcaattcggctttgctttctcgagcccgggtctatttgctgaaagcgctgacagcggcagatatcgagaaagtgatcgatcaggcgatgtctgatagtacccgcggtttgggcggtcagaatatcaagttactggatgaaacccgccgcatgatgtcggagttggtgggaggagacgctcgccgggcgctaaatagcctggaaatgatggcggatatggctgaaattgatgccaaaggtgtgcgagtactgactcctgaattattgaaagaagtttcgggggagcgtagcgctcgctttgataacaaaggcgaccgctattacgatctgatttcggcgctgcataagtcggtacgaggctcggcgccggatgccgcgctgtattggtacgcccgtattattaccgccggtggcgatccgctatatgtagcccggcgtttgttagccattgcttcggaagacgtcggcaatgccgatcctcgcgcgatgcaagtcgctatttctgcctgggattgcttcacccgcgtcggcccggcagaaggtgaaagagccatcgcccaagccattgtttatcttgcctgtgcgcccaagagtaatgcggtttataccgctttcaaagcggcgatgcgtgatgcacgtgaaatgcctgattttgatgtgccagaacatctgcggaacgcaccaaccaaattaatgaaggaaatggggctgggcgcggagtatcgttatgctcatgacgaacaaaatgcctacgcggccggtgagaactatttcccgccggaaatggcggcaacccgctactattcgccgacttcacgcggtcttgaaggtaaaataggtgaaaagctggcatggttggctgagcaggatcaaaatagcccgataaaacgctaccgctagccttgtcgttgcggtaaggttatctttataactacttggtaagcggagaatacttcgcttacgtcagtaagatttcttctaacaaccctttatttttttaactacaagcacaggactagcatgctcgatcccaatatgctgcgcaatgagctagacgcagtcgcagaaaaacttgctcgcagaggttttaaacttgatgttgatacgttgcgcgcacaagaagcacgccgcaaagttttacagaccgaaacagaaaatctgcaggcagaacgtaactctcgatcgaaaatgatcggtgcggcaaaagctcgtggtgaagatatcgagccattacgtcttgaagttaatgcgttgggtgaccagctggatgccgctaaagcggaattggaaacgctgcaaaacgaaattcgcgatttggcgctttctattcctaacctgccggatgattctgtgccagtcggtaaagatgagaacgacaatctggaagtgagccgttggggcgaaccgcgccagtatgattttgacgttcgcgatcacgttgctctaggtgaaatggctggcggtctggattttgctgctgcggttaagctgaccggcgcgcgttttgtggtgatgaaagggcaaattgcccgtatgcatcgcgcattagcgcagttcatgctggatctgcacactgaaaagcacggctatctggaaacttacgttccgtatctggttaaccacgccacgctttacggcactggccaattacctaaatttggtggcgatctgttccacaccaaaccgctggaagaagagtctgacagcagcaactacgcgctgattccaacggcagaagtgccagtaaccaacctggtacgcgacgagattctggaagaagaatccctgccactgaaaatgactgcccatacgccgtgtttccgttcagaagccggttcttatggtcgggatacccgtggtctgattcgtatgcatcagttcgataaagtcgaaatggtacagatcactcgtccagaagattccatggatgcgctggaagaactgaccggccacgcggagaaagtactgcaattgctgggtctgccttatcgtaaaatgttgctgtgcaccggcgacatgggcttcggttcaagcaaaacctacgatctggaagtgtggctgcccgcgcagaacacttaccgcgaaatctcctcatgttccaatatgtgggatttccaggcgcgtcgtatgcaagcgcgctgccgtaacaaagttgaccgtaaaccacgtctggttcataccctgaatggttctggtctggctgttggccgtactttagtcgcggtactggaaaactatcagcaagcggatggtcgtattcaggttcccgaagtattacgtccgtacatgggcggcttggaatacattggcggctaagccatagatttcagctgttgatgttcaaagcctcgcattgcggggctttttaatggcctaaatttgggcgtttatttcggaatatctcctgagatgggggaagttcctgaaagtaaaagtggagaaactcaacattttgtttgcaggcttattgtttgatgagatagcataaaaaccacgctggtagcatatcgtgctattaccactgtcagagcaattgacttttttatcaccagtggcatgatgcgctcactttccatcgcgccaacggtcctcgtttcactatgtccgcatactctcgcccagtgctattgttgctctgtgggcttttgctatttacagtttcaatcgcggtattaaatacattagttcccctgtggcttagccaccagcatttgccagtgtggcaagtgggtatggtaagttcttcatatttcagcggtaatcttgcgggaaccttgatcgctggccgacttattcagcgtttgggctttaatcgcagctatcactactcttgcctgttatttgcggcggcgacctgcgggctgatgctgtcagtcgatttctggagctggttgggctggcgttttatggccggtgtagcctgcgcgttgatttgggtaattgtagaaagcgcattgttacgcagcggcacgccaactaatcgtggacagctattggcggcgtatatgacgatatattatctgggcaccgtgggtggccaactgctcttgggcatggtctctacccagttggccagcgtgattccttgggtgagcgcgttggtgattactgcgatgttgccacttctatttgctcacttcgctaatcagtcggctgaaaccacccatgtgaaggtttggccgatgtttaagcgtcgtagcgctcgcttgggtatcaatggctgtattatctcaggtatcgtgctgggatcgctctacgggctaatgccgctgtatttatcccatcaggggatgagcgatgccaacgtcggatggtggatggcgctgctggtcagttcggggatcttcggacaatggccggtagggcgcatggccgatcgctatggtcgcctgctggtgctgcgtattcaggtatttgtcgtgatattgggctgtatcgcgatgctcagtaactatgcgatggcgccagcgctatttattctgggggcggcaggttttacgctctatccagtcgctatggcctgggcctgtgaaaaagccagttccgatgagttagtggcgatgaatcaggctttattgatgagttacaccatcggcagtctggctgggccgaccatgacatcaatgctgatgcagaatttttctgataatttattattcgtgatgattgcgggagtggcattggtgtatctgatgatgctgctgaagaaaccggatcagcaacacacgccttttgcggcggtgtaacgctctctgccagccggttgcgaaatcccggctggcagaataaacggtaagtcagtaaatcactttgtgaccgtaactttccaggatacctttcactcgatccataatttctttggatggtggcttaacgccgtccagcttatattcttcgcccatggctacccatttatgcttgcctaactcatggtaaggtagcaattcgattttctcgatgttagtcatattttgggtaaactcacctaacatatgggcggatttatcgtcatctgaccaacccggaaccacaacgtagcgaatccaggttttctggttgcgtttcgccagataacgagcgaattccagagtacgatggttagacacgccgaccagattttgatgaatggaatcatccatttgtttcagatccaacatcaccaaatcggtttcatccagcaattcatcaatcaccggatcgtaacggcgaacaaatccgttggtatccagacaggtatgaatgccttctttatgacaagcgcggaaccagtcacgcacaaattcagcctgtaaaatggcttcgccgccggatgcggtcacgccgccgccggatgcgttcataaagtgtcggtaggtcacggcttctttgaccagctcttcaaccgtcacttccttaccgccgtgggtatcccaagtgtcgcggttgtgacagtacaggcaacgcatcaaacagccttgaaagaaaacgataaagcggatgccgggaccatcaacggtgccacaggattcaaatgagtgaatgcgaccaagtacagacattgcagggggttctccaaattgaccgttcaatagcagtcgaaatcaacataacggcggcagggcaggaggaaggggatgcccttgttagctcggtgattcgggcgatcacaacgtctgagctggcactcctgctgccgacgctaggtcggataaaactgttttgccgggcacccactcagggtagatggctggcaaaacagacttttctggcaagtacatcgtgcggtggttggtgaaaatagctgtgcttgataagtaaaggccccacagtcgtggagcctttaagtttatacccttcggacttgaagcaacagggttgttagcggatacacgagcctaaatcagcgacttaagtcagttcatcgggctttgttttcttgctacctgtccgtcactccaaattctttgcgtatcgggttattaaatcgactgagtgaaagtacgagtaataacatcctgttgctgttctttggtcagcgcgttgaagcgtactgcgtaacccgatacacggatggtcagctgcggatatttttccggattttccatcgcgtctaacagcatttcacggttcatcacgttcacgttcaggtgttgaccaccttcgatggacgcttcgtgatggaagtaaccgtccatcagacccgctaagttagctttacgcacttcgtcatctttacccaaagcgtttggtacgatggagaaggtataagaaataccatctttcgcataggcaaacggcagtttggcaacggaagtcagagaggcaacagcacctttctggtcacgaccgtgcattgggttagcacctggaccgaatggggcacccgcgcgacgaccgtctggggtgttaccggttttcttaccataaaccacgttagaggtaatggtcagaactgactgagttggtaccgcgttacggtaggtacgcagcttctgaattttcttcatgaagcgctcaaccaggtcacaggcgatgtcatcaacgcgagaatcgttgttaccgaactgtggatattcgccttcgatgttgaagtcgactgccagaccatcttcatcacgaatagtcgttactttcgcgtatttgatagcagacagggagtcagcagcaacggacagacctgcgataccgcaagccatggtgcgatatacatcacggtcatgcagagccatcagcgcagcttcgtagctgtacttgtcatgcatgtagtgaatgatgttcagcgaagtcacgtattgtttagccagccaatccatgaagtggtccatgcgttccatgactttgtcatagtccagcacttcgtccatcattggcgcttctttcgggcctacctgaattttcagtttttcgtcaacgccgccgttgattgcgtacaacatggttttcgccaggttggcacgagcgccgaagaactgcatttgtttaccgacgatcattgggctgacgcaacatgcaatggcatagtcatcgttgttgaagtcaggacgcatcaaatcatcgttttcatactgtacagatgaggtgtcgatagaaactttcgctgcgaacttcttgaagttcaacggcagtttctcagaccacagaatggtcatgttcggctctggagatggccccatggtgtacagggtattcaggaagcggaagctggttttagttaccagagtacgaccgtcaacgcccataccagccagagactcagttgcccagattgggtcaccggagaacagctcatcgtattcaggggtacgcaggaagcgaaccatacgcagtttcatcaccagatggtcaatcaactcttgcgcttcgatttcggtcagtttgccggctttcatgtcgcgttcaatgtacacgtccaggaaagtagacacgcggccgaaggacatcgctgcaccgttctgggatttcaccgcggccaggtagccgaagtaagtccactgtaccgcttcacgggcgttagtcgcaggacgagaaatatcgcagccgtatttagctgccatttctttgatttgacccagtgcacgatgctgttcagcaatttcttcgcgcagttggatggtcatttccagatcttcgccgttttccagacgtgactgtaatgaattgaactgagccagtttgtctttcatcaggaagtcgataccgtaaacggctacgcgacgatagtcaccgatgatacgaccacgaccataagcatccggcagaccggtcaggataccggatttacggcagttcaggatgtctttggtgtaaacatcgaatacgccctggttatgggttttgcggtattcggtgaacacttttttcagctgtggatccagctcacgaccgtaaactttgcaggagttttcaaccattttgatgccgccgaatggaatcagggcgcgtttcaatggtgcttcagtctgcaaaccaacgatggtttccaaatctttgctaatgtaaccagcgtcgtgggagatgatggttgatgctacgtcggtatcgaagtcaactggcgcatgagtgcggttttccagtttgatgccttccatgaccttggcccacagctcatcggttgctttggtagagccggccaggaaggattcgtcaccttcatatggggtgtagttcttctggatgaagtcacgaacgtttacttcgttctgccagtcaccctcggtaaaaccttgccatgcgttggccaatttttcattaagttcggtcataatgcatctaccttttaatgtgaatttcttcgaaaaccagacgtagcggccacactttaatgttgctggtcaccgcgcagataaattacccaataagttaaccctaccaataacccgccaccaatgatgttaccgatggtaacaggaatgaggttgtcgataacaaagttacttacggtcagattagcaaattgctcaggtgttgctcctatggcttgccagaactcaggcgaagcgaagtttttaatcactatgcccataggaatcataaacatgttggcgatgctatgttcaaagccgctggcgacaaacataccgactggcagaatcatcgcgaacattttgtccataatggtacggccggagtaactcatccataccgctaagcacaccatcaggttagctaaaatgcccaaacatactgcttgaataaaagtatggtgcaatttgtgatctgcggtttgcagcacattcaagccccattggccgttggcaaccatgtattgaccggcaaaccagatcagggcgacaaaaaacagcgctccggccaggtttccaacgtaaacattcacccagttagtccccaactgacgccaggtaatccggccgctggctttcgctacggtggttaatacggtggaagtaaagaggtcgccgccgcataccacgactaacatcaaacccagtgagaagcagataccgccaactaatttcgcaaagccgaaaggaacgcccgcggtgccagtagtagctgtaatgtaaaatacaaaagcgattgagataaacacgcccgcagtaattgccagatagaaagttttcatcggatgcttggtggctttgtagacaccggcatcttcggctactttcgccatggccgcaggtagtaatgcatcgaaggggttgtcagctttcacactaactctctctttagggttaataaagcacaacgagatactagcaaagcagtatagcgtgaaaattgacgtggatcatattgggccactttaatcagccataaacacctgcaatctcaatggttaatcatgttatttcattgatatttaaagagaaaaaatattttaagatttacaaaaaattttgattaaacgttcaattcgatgaagaaaaggttaataaatagcgtaatttgtagattatcgccttcaaccacgctattaaaaattaactatttatttacctgcccataagaatgcgagctttaggcggaattatttgtctaaaagtgccattttctcccaaaaataataactgttttttgatgaaaaaataattctggcgatgggaatttctgcataaataataattcaggcgctgagatgtctatttattaagcgcacagtttatataactcggtgctttatataactcggcgcttatagaacatacagcgataaaaatgaggatagataaatgtagggtaaaaaaacggcgaacccataggattcgccgtcgcttgatgagatagcagttttcagaactggaacaaagctattagttttttgcccagtaacgacgcttggccgcttgcaacttctcataggctcccaacagcgcctgatgtgccggtaatgctttcaaatcaggatcgatgctaaacagcccgtggaagcgaacttcgccacaaagggcggcagaagcggcatccacagcatcttgaccgtacattttcatgaatgcgccatgatattgggcaggatcgcgatccggctcttgagtcagcagcagcaaggtttgcaggcaacggtaatagttagcctgttcaggagtaaatacggaggcgttgaaatcctgcgtccactcaacccaaatcaacgcttgctccaaatcaccaccggctagcgccagcatggatttcagctcgccaacgcgcagggtataccagccgttgtctttcccagaggcgatgcccagcagttcacgaacgcgggcaaaatcatccagaccttcgtcgtccagctgttcgatcaattgcagatactgctctggcttccactcggtgcctggcaacgccagcagagtgtcacgcagatgtacgcccatagtgttattggccatcagcaaatcttctgccggatagatgtcggacatacccggtaccagaatacggcaggcgtaaacgcccaaatgctcataatctgcaatgtaaacttcagcatcttcctgtttgaagatcgccatcagcgtagcgaattcttcttcggttgtgccgctgaaattccagtcaacgaacggatagtctgcgtcctgcttgaacatatcccagctaattaaaccgctggaatcgataaagtgagtttccagattggtgtgttcggccacttcttcgtcatcgaaggttggagcggtgaaaacatccaaatctttcaggctgcggccttgcaacaattcggtcacggtgcgctccagcgctacgccgaagtcaggatgcgcgccgaatgaagcaaaacaagttccgttagaagggttgaataagacgacgcaaataaccgggtaagcgccgcccaaagaggcgtcataagaaaggattgggaaaccttcctcttccagttttgcaatggcttcaactacgccagggtagcggttcagcacctcttgcgggatttcgggcaggctgatggattccgcaataatgcggtttttcacatagcgttcgaaaacttctgacaaaccttggacacgtgcttcattggcggtattaccagcagacataccattagacacataaagatttcctatgatattcataggaatatatactgtctccaggtcagattgacgggtaaagggcagggaacagattccgcgctcaacgttacctgactgtaagtccaccagatcattggcatttagctctttgtctgggtcataaaaagcgtgcagccgggcatcgagaatgccttgtggcagggagccatcagccggaatagggaaccacttctcattgggataatgaacgaactcaccgttggcgatttctttacccaaataaaaatcagcgaagaaatagttagttgataaacgctcaaaatattcacccagagcggaggccagtgcggcctttttgctcgcgcctttgccgttggtaaaacacagcggacagtcgcgatcgcggatatgcactgaccaaacatgaggaaccggattgagccaggaagcttcttcaatattaaaaccgagatcgctcagtttttgctgaaaacgggaaatggagtcttccagcgcagcgtctttgccggggataaaagtttgcgtcatgtttttcactttttgaccgtactaaaaacgcgcaatcatacggggttttggccgatagctccatgtattcctaaagcacaatatatgtcacagtatttgtgtggatttaccggataattcattcatttataaaaaagggagttggcaagatgaagtctttaaaattaaccgttttggcagggattttggcagggattagtggttcggccttggctatgccgaatattacgctgttagcgaccggcggcaccattgctggcggcggcgattcagccaccaaatccaactacaccgcggggaaaattggtgtggatgccttggttaatgcagttccggaaatcaaaaacattgccaacgtacacggcgagcaattggtcaatatcggttcccaagacatgaatgacgatgtctggttgaaactggctaagagaatcaatgcagactgtgcaaaaaccgatggttttgtgattactcacggtaccgatactctggaagaaacggcttacttcctcgatttgacggtaaaatgcgataaacctgtggttgtggttggcgcaatgcgcccagctacagcaatgggcgctgatggcccactgaatctttataatgcagtggttgttgccagtgatccgcagtcagccaagcgcggcgtcttggtggcaatgaacgatgtggtattggatggccgcgatgtgaccaagaccagcaccacttcagtacagaccttccagtcaccaaacaccggtaccgtcggcttgatccatgacggtaaagtgaattatctgcacgcaagcgaacacaaacaaactccgtttgacgtcaccaaactgacgaccttgccgaaagttggcatcgtttatagctatgcaaacgcgtccgatcttccagccaaagcctttatcgccgatggttatcagggcatcgtcagcgccggtgtgggtaatggcaacatgtaccacagcgtcttcgacactctggcaactgcggcacacaatggcgtcgccgtggtgcgttcttctcgcgtaccaaccggttctaccacgcaggatgctgaagttgacgataccaagtacggttttgtggcttctggcctgttgaatccgcaaaaagctcgcgtattgctgcaattagccttaacgcagaccaaaaatccgcaggaaattcaaaaaatgttcctgacttactaagtcgttcattttattaattcgggggcggctcgctgcccctttttaccccgaatcctttttcgcaccaaaacccgccgctaacgcgcacctgacgtcattcaagctcaaattgagttatctatcgcgtagtgagtcgcatagtcattaactttcagcgaataattctgcatgaaatgccaataggcgggcgaaccgctataaaacgccgggacgctttcgaccttctggatgaataagcgttgcagccgttgaatgcgaatgataaaaccgatgtatgggttaaaacgatgattatctcagtgaaagcggtgaggggaaatgacacaggtttacaattttagcgctggcccagcaatgctgccggtggaagttctgcgtcgtgcacaacaagaattatgcaactggcatggcattggcacctcagtgatggaaatcagccatcgcagtaaagaattcattcaagtggccgagcaatccgaacaggatctgcgggatctgttgaaaattcctgataattataaagtgctgttttgccacggcggagccagagcgcaatttgccgcagtgccgcagaatctgctgggtgataaaacctcggcagattacatcgatggcggctattgggcacacagcgccattaatgaagctcagaaatattgcgagccaaatgttattgatattaaagcacaaattgatggtctgaccggcgttctgcctatgagccaatggcagttaagcgcggatgcagcctatgtgcattattgcccgaacgaaaccatcgacggcgtggcgatccatgaagatcccgattttggcgataaaatcgtggtggccgattattcctcatcgattctttcccgtcctattgatatcagccgctatggcctgatttacgctggcgcacagaagaatatcgggcctgcgggtttgacgttggtgattgttcgtgaagacctgctgggcaaagcgcacaaacatgtgccgtctattttggattatcaggtattggcgaagaatgactcgatgttcaacacgccgccaaccttcgcctggtatctttccggcatggtctttaagtggttgaaagagcagggcggtctggtggaaatggaaaaacgtaaccgcgccaaagccgaattactttatagtgctattgatagcagcgatttttatcgcaatcaggtggccacggccaaccgttcctggatgaatattccgttccaactggctaaaccggaactggataacgttttcctcagtgaagccgaagcgttgggcctgcaagcgttgaaaggccatcgggttgcaggcggtatgcgggcgtccatttataacgctatgccgattgaaggcgttaaagtattaactgattttatggttgactttgaacgtcgccatgcctgatagcgtttcagggatttcctgctttatcggcagttattttcccaatgtatttagcggtatgtgccgccattttttgcctcaaaacagccccgttcatgcggggttgttgattaatagaagactggagagtgtttttcccatgctggaatccctgacgttacaacccatcgcgctgattgacggcaccgttaatcttcccggctccaaaagtgtgtctaatcgcgccctgctgctggcggcactggctgaggggacaacccggctaaacaatctgttagatagcgatgatattcgccatatgctgaatgccctgaaaacgttgggcgttaattatcgtctttccgccgatcgcacccaatgtgagattgacgggctggggagcccgctgttggccgctgagccggtagagttattcctcggtaacgcaggcaccgcaatgcgcccattggctgctgctttgtgcctgagccacggcgacgtgatattaaccggcgagccacgtatgaaagaacgcccaataggccatttggtggacgcattgcgtcagggcggcgcgcagattgattatctggaacaggaaaattatccgccgctgcgtattcgcggtggtttccgcggcggcgagctgaccgttgacggcagcgtatccagccagttcctgacggcgctgttgatggcagcacctttggctgcgcaggatacgcaaattcgtattcaaggcgatttggtttccaaaccttatatcgatattactttgcatttgatgcaaagctttggcgttgaagtgacgcacgaaaactatcagatcttctatattgcgggcggccaaacttatcgttcgccgggtgaatatctggtagaaggcgatgcgtcctccgcctcttacttcctcgctgcggcagcgatcaaaggtggcactgtacgtgtgaccggaatcggtaagaaaagcgtgcagggcgataccaaatttgctgacgtattggaaaaaatgggtgcaatcatccgttggggtgatgattatatcgaatgtagccgaggggagttacgaggcatcgatatggacatgaaccatattcccgatgcggcgatgaccattgctaccaccgcgctgtttgccgaagggccaacaatcattcgcaatatttataactggcgggtaaaagaaaccgatcgtctggcagccatggccaccgaactgcgtaaagttggagcagaagtggaagaaggccacgactatattcgcgtgcttccacctgcgcagctgatcgcggcagagatcggcacttataacgatcatcgtatggcgatgtgtttctcgctggtggcgttatcggatacgccggtcactattctcgatccgaaatgtaccgcaaaaaccttccctgactatttcgaacagttggctcgcttaagccaaaccgcatgattctgctggtttaagcatggtttgtattaaagtatgcttcttattaataaatgggcgggataaccttcccatttatacaaattgaaaatatgttcagcaaaacacatcaattttccctaaacttattcaacgtggtgtggttttattttcagcaactacacctcgcagggtaacagttctcgcagatgcggcgtataatgtcgcacctgtgtttacccgatggggtagacaagaggttttgcctaccgaaaggagagagaaatgacggcgatagccccggtgataaccgttgatggaccgagtggtgcaggcaaaggcacgctgtgtaaagcactggctgaaacgctgaaatggcgtttactggattcaggtgcaatctaccgcgttttagccttggctgcgttgcatcatcaggtcgatatcagcaccgaagaggcactggttccacttgccgcccatctcgacgtccgttttgtcgcagaaaacggagaattacgcgttattcttgaaggtgaggatgtcagcaatgctatccgcactgaaacagtgggtaataccgcctctcaggcagccgctttcccgcgtgttcgtgaggcgctgttgcgccgtcagcgggcatttcgcgaagcgccgggtctgattgccgacggcagagatatgggaaccgtagtgtttcccgatgcgccagtgaagatatttcttgatgccagttcggaagaacgagcacacagacgcatgctacagttgcaggaaaagggctttaatgttaactttgaacgtcttttagccgagatacaggagcgagatgatcgcgatcgtaatcggtctatagcgcctttagtacccgcagccgatgcgttaatactggattcaaccagtatgtccatcgagcaggtgattgaacaagcgctggcgtatgcccaaaaagttttagcgttgccgtcgtgttaataacgtcagcgtagcaagaaccgagctcttaataacttgttattaaagggcaaattaaccttactgccaaggatggacggcgaggcatgtgaaacaaccccattaggcaggatgcccgatggacgttaaacttaagaatcctgaagattattaacatgacagaatcttttgctcaactctttgaagaatccctgaaaacaattgaaacacgtccgggctctatcgtccgtggtgttgttgtttctatcgataaagatatcgtactggttgacgccggtctgaaatccgaatccgcaattccagcagaacagttcaagaacgcgcaaggcgaactggaaattcaggttggcgacgaagttgacgttgcactggacgcagttgaagatggcttcggtgaaactcagctgtcccgtgagaaagctaagcgtcacgaagcatggctgactctggaaaaagctttcgaagttgctgcaactgtaatcggcgtgatcaacggtaaagtgaagggcggcttcacagtcgaactgaacggcatccgtgcgttcctgccaggttcactggttgacgtgcgtccagttcgcgatactctgcatctggaaggcaaagagcttgagttcaaagtcatcaagctggatcagaaacgcaacaacgtagttgtttctcgtcgtgccgttatcgaatcagaaaacagcgcagaacgcgatcaattgctggaaaacctgcaagaaggcatggaagttaaaggtatcgttaagaacctgactgactacggtgcattcgttgatctgggcggcgttgatggcttgctgcacattactgacatggcttggaaacgcgttaagcatccaagcgaaatcgtcaatgtgggcgacgaaatcactgttaaagtgctgaagttcgaccgcgaacgtactcgtgtatccctgggcttgaaacagctgggcgaagatccatgggttgctatcgctaaacgttacccagaaagcactaagctgactggtcgtgtaaccaacctgactgattacggctgcttcgtagaaatcgaagaaggcgttgaaggtctggtacacgtttctgaaatggattggaccaacaaaaacattcacccgtctaaagttgttaacgtaggcgacgtagtggaagttatggttctggacatcgatgaagaacgtcgtcgtatttctctgggcctgaaacagtgcaaatctaacccatggcagctgtttgcagaaactcacaacaaaaacgaccgcgttgaaggtaaaatcaagtctatcactgacttcggtatcttcatcggcttggacggcggcatcgacggcctggttcacctgtctgacatctcctggaacgttgcaggcgaagaagcagttcgtgaatacaagaaaggtgacgagatcgcagctgttgttctgcaagttgacgcagagcgcgagcgcatctccctgggcgtgaaacaactggcagaagacccgttcaataactacctgtctatgaacaagaaaggtgctattgttactggtaaagtaactgcagttgacgctaaaggtgctacagttgaattggcaggcggcgtagaaggttacctgcgtgcttctgaagcaactcgtgaccgcgttgaagatgcaacgctggtactgaacgtaggtgatgaagttgaagccaaatatactggcgttgaccgtaaaaaccgcgtaattagcctgtctgttcgtgcgaaagacgaagctgatgagaaagatgcaatcgctactgttaacagtaagccagaagaaagcaacttctctaacgctatggctgaagcgttcaaagctgcaaaaggcgagtaataacggggggcggtttctccgcccctatacggtagtttagctgcaaagcttggaggtaatatgaccaagtctgaacttattgaaagacttgctggccagcaatctcatgtaccggcgaaggccgttgaggatgcagtgaaagaaatgcttgaacatatggctggaacattagccgaaggtgagcgcattgagatccgcggatttggcagtttttctcttcactaccgtgctccgcgtgttggtcgtaatccgaaaactggcgataaagtagagttggaaggtaaatacgttccgcactttaagccgggtaaagaattacgtgatcgcgctaatatctacggttaagttgttcgcaaccagccgggttattgcttgtgaaaatatgaaacggtgcctttatggcgccgtttttctttttataatcatcgaattctgataaaaacctctttgccaaataacgcctttatttccagctcacttatcctgcactgaattaaaaactcgttttttaagttaatccttccccctgtattcactttcactctgagttaaaccaatcatccgctgttttcctcacgttatttctttctaactagtcactattttttgaagtttgtcgcaattccatttgggtatttgcaaccgctgaaactcgctttcgaggctcctcggaggatttagtcttgatgctggtaaagcacgctttaatactgaaaatacgcttagcggcaggatgctgtgaaaagaccaatagctaattatcaaaggatgattttttactgtgttatcaatcgatcgatgtgctggggcgttaattataggtttgctaccactgatgtttatcccacgcttaccgggtactgtgccagttttattattgctgtttaccgccattatcctgtggcttagcggttataaaaacgctcggtttgcggctttgccaatattgagctttttatggggaaactggcaggctgccggtctggtgaatcaaatagagtatatggttcagggagataagttgatcgttgctactgttgccagcatttctttaattagccatagggaggagagcgccagaatgctattgaaaatcgagcaggcagatggtcgtcgagtctttccaccggtttccgtttcggtccattggccaaaaaaatggcctgcatcctgttctggtcagcgctggcagctaaagatccgcatgaggccagtacacagcttgcttaatgaaggcggattcgatagccaacgttgggcaatggccaatcgacggcctctgaccgggcgaattatcactgggcggatgttggaggggaattgtcatttacggcaggacatcatctctagaacagatcggcaattgcagtcctatagtcagaggtccttgctattagcgctggcttttggcgagcggggggaattatcactacagcagtgggagactttgcgaaaaaccggcactgcgcatcttatggctatttcgggtctacatattgttatggcggcgttatttggccgtttattagcgagagcgattcaatatttatttccgacgcgctggataggccccttattgccattactttgcgggtggctgctcgcattaacctatgtttggctagcgggtgctaacccaccggcattgcgggcaggattggttttaacgctgtggttagctttacggctgtttggcgttctatccagcccttggcaggtttggctatgggcggtggcactgatactgcttagtgagcctttaacactgctatcagatagtttttggttatcctgtatggcagtactgagtttgctgttttggctgcactgggttccactactttccccatttctaacgaaaaatcgctatgcctggccactccgcctggcgcatttacaatttgggatgatgttgttactcatgccgttgcaaatgctcctatttcatggcattagcctatcctcgtttcccgcgaatttatgggcgatgccaatagtgtcatttatcaccgttcccttggtgttagtagcattggtattttcatttttctcctcatttgcggaagtcttctggtcgttggccaatagctcgctagagatcgctatgctgcctttaaacaacttaaaagcaggctggcagcacactggcgaaacggcgatggcgattggctgtctaggctggctgggcgtagtgatatggcgtttccggtggtggagtttatatcctttcgccgttattgctctctgcgtcaatttgattcttatcgctcaacggcgagatacccaccgatggcgagttgatatgctggatattggacatggtttagccatcgttatagagcgggaacgcagggcggtgatatttgataccggtaatcgctggaggacgggcagcatggcggaaaaagcgattttgccgtatctcaaatggcgaggtttaacggtggatcatattattctgagtcacgatcatttggatcattccggcgggttagagttgattcgcgctgcctttcctatggctaaagtgagggcaccttttcccataaagaatattgaacccaataggtggttattaccctgtcggcgaggggatcgctggcagtggcagcagcttgattttgaggtgctctggccgccacaattgaccgaaaatgcgcaaaacgacgattcctgcgtcattcgcatttcagagggcaagcatagtctgctgcttaccggagatattgaaaggaaaagcgagcgacagctggttaaaacatcccgccataaattgcggtctacgttgctacaggttccacatcatgggagcaatacctcgtctatcgctccttttctccgcgcggtacagcctgaattagctatggcatcggcatcacgttataaccaatggcacttgccagcgaaaaaagtcatcaatcgttacaaagaaaatgggattatctggcgtgatacatcgcgctctgggcagctcagtatctctttctcagaccatgattggcagattaaaggttatagagaacaattatttccccgttggtaccaccagcgatttggtgttgggagccataatgagtagaataggccgctatttcttctggtactggtatttgaatgatgaatgataaagatctctccacctggcagaccttccgtcgcctttggccgatgatcgctccttttaaaaccggtcttatcgctgcggcgatagcgctaattctgaatgcggccagcgatacctttatgctgtcgttgttaaaaccgttgctggatgatggttttggtaagtcgaacagttctatcctgatgtggatgccactggccattattggattgatgttggttcgcgggatcagcggttttatctccagctactgtatttcatgggtttcgggcaaagtggtgatgcatatgcgccgccgcctgtttagccatatgatgggcatgccagtatcttttttcgatcaacaatctacaggcacattgctgtcgcggattacttatgattccgagcaggtggcttcttcttcttccagcgcgttgattaccgtagtgagagaaggtgcgtcgattatcggcctgtttatcatgatgttttattacagctggcagttgtcgctgattttaatcgttattgcgccgatcgtttccatcgctattcgcatggtatccaagcgcttccgtaatatcagtaagaatatgcaaagcaccatggggcaggtgacgaccagcgctgagcagatgctgaaagggcataaagaagtattgatcttcggcggtcaaaaagtagaaaccgaacgttttgataccgtgagtaaccggatgcgtcagcagggcatgaaaatggtttctgcctcttctatttccgatcctattattcagttgattgcttcatttgcgctggcatttgtgctttatgctgccagtttcccaagcgtgatggaaacgctgactgccggtactattaccgtggttttctcttccatgattgccttgatgcgtccgttgaagtctctgactaacgtcaacgcccagttccaacgcggtatggcggcctgtcagacgttattcagtattctggatatggaacaggaaaaagacgacggcaaattagaaatcgatcgcgtaaaaggggatatcgatttccgtaatgtgacctttaaatacccaggcaaagaaacgccagcgctgatagatatcaatatgcatatcgaagccggtaaaaccgtagccttggtagggcgttcaggctcgggtaaatcaacgattgctaacctgattactcgtttttatgacgtcagctccggcagtatcctgatggatggccacgacctgcgggaatacaaacttagttctctgcgtaatcaggtggcgctggtttcgcaaaacgtacatctattcaacgataccgtcgctaataacattgcctatgccagagatgaacaatatacccgcgcagagatagaaaaagcggcgcgcatggcctatgccatggactttattgagaaaatggataacggtctggatacggtgattggtgaaaacggcgtgatgctttctggtggtcagcgccagcgtattgctattgcccgcgcattactgcgtgactgcccgattctgattttggatgaagcgacttcggctttggatactgaatctgagcgagctattcaggcggcgttggatgaattgcagaaaaaccgcacctcgttggtgattgctcaccgtctgtcgacgattgaaaaagccgatgaaattctggttattgaagacggccgcattatcgaacgtggggaacacagcgagctgctcgctcgtcaaggcgcctatgctcagcttagccgcatgcagtttggccaatgattgagcgtatctggtcaggcgaatcgcgactgtattggctgttattaccgctatcctggctgtacggtgggattagctggttgataaaaagcagttatcgactgggtttgcgtactagctggcgttcccctgtacccgtcgtggtggtggggaatctgactgctggtggcaacggcaagacgccagtcgttatctggctggtggagcaactgcggctgcggggtcaacgcgttggcgttgtttctcgtggttacggtggaaaagccgatagctacccgttggtgctgaatgaaaatacaccaacgacgcaggctggcgatgagccggtgttgatattccaacgtaccggtgcgcctgtagccgttgcgccgaaacgctcggaggcgattcaggctctgctaaaaaaccatgctcttgatgtgattatcaccgacgatggtttacagcattatgctttgcaacgagattttgaaattgtggtggtggacggcgttcgtcgatttggtaacggctggtggttgcctgccgggccaatgcgtgaaaggcctgagcgattggcatccgtggatgccattatcacgaacggcggaaccgcggctgcgggagaagtgccaatgctgctaaaagcggggcatgcggtgaatattctgactggtgagcaattgcctgctgaacagctaaagaatatcgttgccatggctggtatcgggcatccgccacgctttttccgaaccttacgtcaattaggggttacgatagagaaagaacacgcttttgctgatcatcaggatttttcgctgtcccagctccagagtctgaccagtgatagtcaaaccctgttaatgaccgagaaagatgcggttaaatgctgcaagtttgctcagcctaattggtggtatctgccggtaacggcagaattaccgccagcacagaccgagcaattattggctcggattatttcgctacgtagcgctgacgattagcgcatcacctaatccgataaaatctcaggcaaacctagaatctgagcacaggccgctatcgagcggcgctgtgtatcttcatacagtgccagttcatcgataaccggcgtgcctaaatctcgctcaaacgcttcccgactggagtgttcgctaaagtgcgtgcgcgctttatctcccaggttcgactgaaatattcctgcggcactgactggcagaaaatcctcatacaccaaaggttcaaagtcgatataaccgctattgataagatcgtcaagagaagcactgttgcggttttttagctcgatatctggcattttccccgttggaaaatagcggtagaaggccagtttctgcgagcgcatcgcctcgtgatcatcagggaaggcgctaaagtgatgagacagcagtgccatatacctattggcatttttctcacaggcgggctgttgcagttcatcctgtgcggcttgtaataagcgatcgtataatgcacgccctttggcggttagagcggcgccacgctgttcgatttcgccgaaacgtgcagtatgcttaccctgaatgctctgtccatttgcttgtgggaaagcaacctgctcttccaacgctttgaaactggtttggcgcagcaaaatagggcagcggcgggctggcgggccttcgattaccgctttaggcgtaatactatgctccggcattgctcgttgaacggcgtcgatatccagcgttcgtggcgttaaatgattaatgtgcggccctttaaatgcgactacgtcggcaatcaggcggtgctggtcgtgcaggcgttgatatatctcggcgttcacggtcgcagcattgtgccagcggaaagtttctaaagcctgagtgataaagtcgtcagcttcttgccgagtcaaaccgccagcgatttcatgacgtttaatcagctcaagagcgcgtggggtaaaaatagtgcggcgcgccagtatttccgccgctagctgacgtaattccggttgttcgatcagttccagccgcagcagggaagtgaataccctaaacgggctggcctgaagcgatgtctcgtggatggcgcgaaacgcggtggaatgtactggcactcccgctggagccagatcgtaataggccacaggaaccatgcccatcacagcaaacaggcggcgtaacatcgctagttcggcggcggttccgacgcggattgcgccgtgccgctccatattcagccgctcaatttcgccagtgcgggctaagtgttttttcagttccggatgttcagccatcgcctgctgattggtttgggcaacaatctgcaatagggtgctgtaaagaggaacttcagtttggtacatctcggacatggcacgagagaatccagcgcgaatctgatctggctgaatcagctgtggggtgttcataatagggtaactccttttatcgtctatattttttactgtttttcttagtacgaaaatggcttagaaaaaatagggatacatcaacgctaagctgccttttagtctaggcaggaaacgcagagtcgaggacaacccgcaggagaatattgaggaattatgcgccagctctcattgattcttatttcggcaataaaatagaagagaaaatagttgcgcggctatttattttatgcgttaatagccgcggcctgtgatgcagacctatttatgtgtaagcgtgtgtagtgagagtataaagagtactagcagttcctcccaagccgttatcatttgattccgcttcaaagacgaaccttctaagaatctccggtaaacaacttccataagtaacgttcctgaatacagtccagctattttagatagcaataagtgccttatggcgagttataaatatttttgaaggtaaagtttatgtctaagaagactggtcaagttaaatggttcaacgaaagcaaaggttttggttttattgaacaaaacgacggtggcaaagatgtattcgtacatttctctgcaatcgccactgacggattcaaaactctggctgaaggccagcgtgtagaatacaccgttgaagacagcccgcgcgggccggctgctgcaaacgttgttgctctgtaattcagagattaataatgtttaaaatattttaggataaaaaatggtaaagcaaatgcgctaaccgttgacctgaatatttaaaaattctaagacccgcattatgcgggttttttcattaattcaagctcatagaggtttaatcaaaaaactttaggatgggcaactgcatctaaacaataaataaaaatgagttgttaggatgcccagtaaaaggaaatttattatgacgttaaaaatgggtcgggtgaaatggttcaaccagctgaaaggctacggttttatttcaccactcgatggtgggctggatgtttatgtcagcaaaatggcaattgccaacaccaaaaataaatcactaagtgaaggacagaacgtagagttctccacttacaaaagtattcacgggccttctgcggccgatgtgattgctttttaaagcgaacggctaccaaggtagccgtttgtattttaccgatacttcgatatgcgatggtaatacaggtgctctttatttggttaattaaaatctgaattttattcgattcttaatgactaaagttagcgaacatcgcgatgattttatgaaacagtttcatcttcaatccaagaaataaattgtgtgatgtaagtcacaaaattctactccccgtatttcaacatatcaataacattcaccgaaaaatgccatttttctttgttgccgttcttgatgagttatcgctcgcagtaatggaatattgagttggttaacctgcctgagtggatatgctattctcttacgctttcctgctgtcgatagctccacgtcctcggagggtgtatggatcaccgtttactcgaaatcgttgcttgcccagtgtgcaatggcaaactgtattttaataaagaaaatctggagttggtgtgcaaagccgacaatctggcttaccccgttcgcgatggcattccggttttgctggagaatgaagcgcgcgccctttccgttgatgagaagcacgcatgagttttatcgcgattattcctgctcgttatgcttcaacccggctgccgggtaaaccgctggcggacattggcggtaagccgatggtggtacatgtgatggagcgcgcactggagtctggtgccagtcgggtgattgtcgccaccgatcatgatgacgtggttcgtgccgtgcaggccgcaggcggcgaagtttgtctgactcgcgccgatcatcagtccggtactgagcggctggccgaagtgattgaacgctacggtttcgctgatgacgatattattgtcaacgtacaaggcgatgaaccgctcattcctccggtgattatcagccaggtagctagcaatctggcggcttccagcgccggtatggcgacattggcagtgccaattgaaagcagcgaagaagcttttaatcccaacgcagtgaaagtggtgatggatgctcagggctacgcgctgtatttctcccgcgcggcgattccgtgggaaagagagcgttttgctcagtctaaagacagcatcggtgactgcttcttacgtcacatcgggatttacgcttatcgcgccggttttattcgccgctatgttaattgggcgccaagtaagctggaacagatcgagctgctcgaacaactgcgggttttatggtacggagagaaaattcacgttgccgtggcgaaagccgcgccggcggtgggcgtagatacccaggaagacctgcaaagagtacgggatattctactcaataaatcaagtagatagaaagtcgcgccgaaaccctaggtcgattgtaaaaccaaaattgtaaaaagatagcaaaaccaaacgccggagtgctggtcacccggcgtaattatttccccgcctttttgttgtttgcccgcttttgtttgatctgcattctggaaatatccccaagctcatctcattatggtgttctaccgcaatcgtcattctgctgtcagtcataatgggcaaacctagtatggaacagttaaaggccgaattaagtattgtattgggtgaatccattacccggcttgaatgtgtcagtgagcagccttatgcccatttgtttgcaatttatgacaaacaggggcacgcgatcccgttattggcgaaaagctatgtttgtcagggcattgcccagcaggaggcctataaactgtcgatgctggcgcgggacggagatattcgtttacctacggtctatggtttggtgatgacccatcagactccttacaaagaaattctgctaatggaacgactaaggggcgtctcagtggaagcgcccccacggacgccagaacgctggaatgtattgatggatcaaatcgttgaaggcgtactggcctggcatcgcattgatagccacggctgcgtcggcaatgtagacagtatgcaggaaaatgattggtttagctggtatcaacagcgggtagaggtgttatggtccagtttaagcaacctcagctcaccgctagtcactctggacgaccgtgccgttttataccgttctagggcgggattatctcagctttttgccgattttgacgacagttgcgtgctgattcacggtaatttaactctgagaagtatgctgaaagatccccgtagcgatcagttattagcgatgttaaatcccggctcggtgctgtgggctccgcgcgaatacgatcttttccgtctgagcgaagaagggatgccaagccagctattgtaccgctatttgcagaaagccccggtttctgaggcttttgtctaccgccgctggctgtacacgctttgggaattagtcggacgatttattcacaccggctatttcgaccggccactgtttgatcgcgcagccagccaactattgccttggcttgcctgatttccctttccttagggttaatgacttggagcgtcggcgggggatttcacccattgccagagtttccctaaggtttcgtaccaggcacgttcactgtgataaagatagctggcggcgggaatagcgcgttcccagctgtgtaacgggctggtaatggctaattgatttgctggggcgggaataggatgtaatcccttggcagtaaagaaattaatggcgcgcggcaggtgattagccgaagtgaccaacaggaaaggtttatctcccaccagagtggccacgtctgccgcttcttcttcggtatctttcggtttttccaacatcacaatatcactgctcgctacgcccagactttgagcaacctgcgcagcggttcgggcgctgctttgcgaagcggggccaaagccgccggtaaataccagtttgctgcccggatgctgtaaatacagtcgaataccttcagtgactcttggcaaactattgggaaataaattcgcgctgggtgcccaattcggattaaaggtatagccgccaccgaggacaacaatgtaatctacccgatcattaccctgataagtggcatacttattttcgataggtagcaataaacgatcggccacgggttgcaggctaataagcaataatactaaccagcttagggtgagcagcgccttgccacttttttgccagtgggtaaaccataataggattaaagccaaacctattaatataagtaaaagtggtagcggcattaataacccgccgaggaacttttttagggtgaatagcatgaaaaagtgaaccttttggctgaaaaaacggcatccgggcgggattactgcccaagaagatttattctacgtctggctgtgccaaaatagcatatttggggcgaactctttttcccctgtcgttatatacccgcgaagtttcgtaccctggcttacaggcgatagagcgaaagtgaaaaggtatagatttcattaacggagcagttgtccatgcagcaggatcgcaatttcgatgatattgccgaaaaattctcgcgtaatatctacggcacgacgaagggaatgattcgtcaggccgtggtttggcaagatatcaccgagctgttgacacagttgccgcagcgaccgctaaggattctcgacgcgggcggtggtgaaggacatatggcctgtcagttggctgcccttggacatcaggtaatgttgtgcgacctttccggcgagatgattcagcgcgcgcaggcggctgcgcaggaaaaaggagtgagccacaacatgcaatttatacaaagtgcggctcaggatatcacccaacatttggaacagccggttgatctggtattgtttcacgcggtgttggagtggattgcggaacccgaagaggttttacaggtactttgtgatgcattaacccccggcggcgccctgtccctgatgtttttcaattcaaacggcctggtgatgcgaaacgccgtgttgggtaacttccaactggctacgcctgatgtgaaaagacgccgccgacgttctctgtcgccgcagtatcctttggacccgcctaaggtttatggctggcttgagcaaatggggatgaccattagcggcaagacgggagtgcgggtgttccacgattacttaaagaacaaacagcagcaggtggaagaatttgctgagctactggcgctggaacagcgctattgtcggcaggaaccctttattagtttggggcgctacgtgcatgttatggcgtttaagccgaacctgaaggaccaactatgagtgaattttcccagacagtacccgaactggtcgcctgggcgcgaaaaaatgatttctcgatttcgctgccaacggagcgtttggcatttattctggccattgccaccttaaacggtgagcggttggacggcgaaatgagcgaaggcgagctgatcgatgcgtttcgtcacgtcagtaaaggctttgaacaaacccacgaaaccgttgccgtacgggccaataacgccattaatgatatggttcggcagcgtcttcttaaccgattcaccagcgaactggcggatggcaatgccatttaccgactaacgccgctgggcatcggcattaccgattattatattcgtcaacgtgaattctctacgctgcgtctttccatgcagttatctattgtggcgcaagagttacagcgcgcggcggaagcggcagaagagggcggcgacgaattccactggcatcgtaacgtctttgccccgctgaaatattccgtcgcagaaatcttcgatagtatcgatatgacccagcgcctgatggatgagcagcaaaacagcgtgaaagaagatatcgccgctttgctcaatcaggactggcgcgcggcgattgccagctgtgagctgttgttgtctgaaacttccggtaccctgcgcgagctgcaagatacgctggaagccgccggggataaattacaggctaatctactgcgtattcaggaagctactatcggtaatgcaggtttggatctggttgataagctggtgtttgatttgcaaagcaaactggatcgcattattagctggggacagcaggccatcgatctgtggatcggttacgatcgccacgtgcataaatttattcgtaccgctatcgatatggataaaaaccgcgtattcgctcagcgtttacgtcagtcggtacagaattactttgataacccgtggacactgacctacgccaacgccgaccgcatgctggatatgcgtgatgaagaactggctctgcgtagtgaggaagtgaccggggaactgccgccggatctcgaatttgaagagttcaacgaaatccgcgaacaaattgccgccatgattgaacaggcgctgctggtgtatcaacaacagcagataccgcttaatctgggggaagtgatgcgcgattatcttgcgcaatatccgcgtgctcgtcattttgacgtggctcgtatcctggtcgaccaggcggttcgcctcggtgtggccgaagccgatttttcagggttaccggcggaatggctggcgattaatgattacggagccaaggtgcaggcacatgtcatcgacaaatattgagttagtaatgccagttaaactggcgcaggcattgagcaattcgctgtttcctgcattggacagtcagctgcgagctggccgacatattggcatagatgagttggacaaccacgccttcctgatggattttcaggatcagttggaagaattttatacccgctataacgttgagctgattcgtgcgccggaaggtttcttctatttgcgtccgcgttcaaccacgctgatcccgcgttcggtcttgtccgaactggacatgatggtgggtaaaattctgtgctatctctatctcagcccggaacgtctggctcacgaggggattttcagccagcaggaaatgtatgaagagttgctgagtctggcggatgagagcaagttgctgaagtttgttaaccagcgctctaccggttccgatctggataagcaaaagttgcaggagaaagtccgtacttctctcaaccgcttacgtcgtttaggtatgctctactttatgggcaacgacagcagcaaattccgcattactgaagcggtattccgttttggtgccgatgtgcgcagcggcgatgacccgcgggaagcgcagttacgtatgattcgtgatggcgaagcgatggcggtggaaaacagtctgtcgctgcaagacgataacgacgagaacgaatcaacccaggcgaatgccgcggaaagtgcagaggatgaacaggaatgattgaacgcggtaaatttcgctcactcacgctggtaaactggaacggtttctttgcccgcaccttcgatctggatgagttggttactacgctgtccggcggtaacggagccggtaaatccaccaccatggcggctttcgtgacggcattgattcccgatctgactttgctgcatttccgtaacaccaccgaagccggtgccaccagcggttcccgcgataaagggttacacgggaaactgcgtgccggggtgtgttattccacgctggatgtgatcaattcccgtcaccagcgcgtggtggtcggggtgcgcttgcagcaggtggccggtcgcgatcgtaaagttgatatcaaacctttcaccattcagggcttgccaacggcgattcagccgacgcagatcctcaccgaagtggtaggcgagcgtcaggcgcgagtgctttctctgcaagagctgaaagagcgtgtggaagaaatggaaggggtgcagtttaagcaatttaactccatcaccgattatcactccctgatgtttgatttgggtgtgattccaaaacgcctgcgttcttctgccgatcgcagcaagttttaccgattgattgaagcctctctgtatggcgggatttccagcgccattacccgctcgctgcgcgactatctgttgccggaaaacagtggcgtgcgtaaagccttccaggacatggaagccgcgctgcgggaaaaccgcatgacgctggaagcgattcgcgtgactcaatcggatcgtgatctgttcaagcatttgatttccgaagccacttcctacgtggcggcggattatatgcgtcacgccaacgagcgccggattcatctggacggcgcgttagtgctgcgccgcgatttacttagcagccgcaagcagttggtgactgagcagtatcgtcacgtagaaatgtcccgcgagctggcggaacaaagcgccgctgaatccgatttggaaaccgattatcaggccgccagcgaccacctgaatttggtgcaaacggcgatgcgtcagcaggaaaaaatcgagcgttatcagagcgatttggaagagttgacttaccgcttggaagaacagaacgaagtggtggccgaagccagcgaacagcaggcggaaaacgaagcccgtgcggaagcggccgagcaagaagtggatgagctgaaaagccagctggcagattatcagcaggcgctggatgtgcagcaaactcgcgccattcagtatcagcaagctttacaggctttggagcgcgcgcgcgcgctgtgtcagatcccggatttgactgctgacaacgccgaagattggctggacactttccatgctaaagagcaggaagctacggaatcgctgctgttgctggaacaaaagctcagcgtggctgatgcggcgcacagtcagtttgaacaggcttatcagctggtggttaatattgccggtcaggtgagccgcagcgaagcctggcagaccgcacgggaattattgcgtgattggccgtcgcagcaacatctggcggagcgagtacaaccgctgcgtatgcgtttgtctgagctggagcagcgcctgcgttctcagcaggatgccgagcgtctgttgcaggagttctgtaagcgtcagggccaggtttatcagcctgaagagctggaagaattacagcgtgagctggagcaaaaagttgaggaattgtccctcagcgtgtccgatgccggtgaacgccgcatggaaatgcgccaggaactggaacagattaagcagaaaattcagacgctaaccagccgtgcgcccatctggcttgcggcgcaggacgcactgaatcaactgagtgagcaaagtggggtatcgctggaagacagccgtcaggtgacggaatacatgcagcaactgcttgagcgcgaacgtgaaactaccgttgagcgcgatgaagtcgcggcacgtaaacgtcagattgaagcgcaaattgagcgtctgagccagccaagtggtgcggaagatccgcgcatggtggcgttagccgagcgtttcggcggcgtattgctgtctgaaatctatgacgatgtcactatcgacgatgcgccgtacttctccgcgctctacggtccatctcgccacggtatcgtggtaccggatctgtcgctggttcgcgatcagttggtggggctggaagactgtccggaagacttgtatctgatcgaaggagacccgcagtcctttgatgacagcgtatttgccgtcgaagaacatgaaaaagcggtggtggtgaaaatcgccgatcgccaatggcgttattcccgctatccggaagtgccgctgtttggccgcgcggcgcgggaaaatcgtctggaaaccctgcacgccgagcgtgacagtctggcggaacgttatgccacgctttccttcgacgtacagaaaacccagcgcgcccatcaggcattcagccgctttattggttctcatctggcggtggctttcgatgcggatccagaagctgaaattcgcctgctgaatacccgtcgcggtgaaattgagcgcgctctgagtgctcacgaagatcaaaatcagcagcagcgtcagcagtttgaacaggctaaagaaggcattgcggcgctgaatcgactgattccgctggtgtctttgctgcttgacgacgctttgcaggatcgggtggaagaaatcagcgaagagttggctgaagcgcaggaagcggcgcgtcatattcagcagcacggtaatgctctgatcaagctggagcctttactggcggtgctgcaaagcgatccgcagcagcatgaacagctgaaagaaagctatattcaggcgcaaaacagtcagcgtcaggccaagcagcaggcctttgccttaacggaagtggttcagcgccgggctcacttcagctataccgattctgccggtatgctgaatgaaaactccgatctgaacgacaaactgcgtcaacgtctggagcacgcggaagccgatcgtactcgcgctcgcgagcaattacgtcaataccagacccagttcactcagtacagtcaggtactggcgtcactgaaaagttcttatgatgctaagcgggatatgctcaaagagctgacccaggaattgcaggatattggcgttcaggccgatgcgaatgcagaagcgcgtgcgcgagctcgtcgcgatgaattgcatgcggcgctcagcaccaaccgttcacgtcgtaatcagctggaaaaacagttgaccttctgtgaagcggaaatggatagcctgcaaaagaaactgcgcaaactggagcgagattatcaccagattcgcgagcaggtggtgaatgccaaatccggctggtgcgcggtgatgcgtatggtgaaagataacggcgtcgagcgtcgcttacatcgtcgtgaactggcgtatatggacggcgaagaactgcgttcgatgtcggataaagccctaggcgcactgcgtctggcagtatctgataacgaacatctgcgcgatgtgctgcgtctgtcggaagatccgaagcgtccggaacgcaaaattcagttctatatcgcggtttaccagcatctgcgcgagcgtattcgtcaggatattattcgcaccgacgatccggttgaagccattgaacagatggaaatcgagctgggtcgcctgaccgaagaactgactgcccgtgaacaaaaactggcaattagctccaaaagtgtggcgaatatcatccgcaaaaccattcagcgcgagcagaaccgtattcgtatgctgaaccaaggcttgcaggcggtttccttcggacaggtgaaaagcgtgcggttgaacgtgaatgtacgagaagcccatgccactttactggatgtgctgtctgagcagcaggagcagcatcaggatctgtttaacagcaaccgtctgaccttctcggaggcgctggccaaactgtatcaacgcctgaacccgcaaatggatatggggcagcgtttgccgcaaaccatcggtgaggagctgttagattaccgtaactaccttgagctggaagttgaagttttccgtggcgcagacggttggctacgcgcggagagcggggcgttgtctaccggtgaagctatcggtaccggtatgtctattctggtgatggtggtgcagagttgggaagaggaatctcgtcgcctgcgcgggaaagatatttctccttgtcgcttgctgttccttgatgaagccgcacgactggatgcgaaatctattgcgacgctgttcgagctgtgtgaacgattggaaatgcaattaattatcgctgcgccggaaaatatcagtccggaaaaaggcaccacctataaactagtacgtaaagttttccagaatcatgagcatgttcatgtggttggattacgcggtttcgccaatgatttaccggctatcgcgacaacacagacagaaataccgcaataacttcggaattaactgaggcgtaaataaatgaaaatggccgctaacagacggccattttttatagcttaaataaaatgagcttccattttatcgatgtgagaaatctgttagcgtaaagaatcgatttactttgtcgtataaataagtcaaatatcatttctgtttgtataataaaacttattagtaatggtcacgacaaactatgacgtacttagatgagcataccgggggcatagaatgtcgctagaaaagagaaattcactacggccattagccctatattgcgcacttatctgtagccagatacctatgttcagcgcttcagccactgcaccgactttgcccgtcgactctgcggctttgcccgtggagacaggaaccatgtcggtagcgcagagccgctctaaactgctggccgtgctgccaaaaaatatcacgccttattacgcttccaatctggcggagctatatgcgtctaaccagatgcggccgatgtggcaggatcgtctggcggtaaagagatttcagcagcaattagctgaactagcgatgtccggcattcagccgcagtttatgcaatgggtaaaatggttgagcgacccggaagtcaaaggaatggcgcgagatgtgattctgtcagacgcaatgttgggctacctgcactttgtgtcaggcgttggcgccaacggcagcgtttggctctatagcaacgtcccttacaaaatggccatgccgcctgccacgatactgaaccgttggcagcaagccatacgcgaaggcaatactgccgcctacctttcgactttggtaccacagcatccgcagtatgaaaagatgcatcaggcgctgaaaaccatgctggccgacaatcgtccttggccgcagtttaccggcgcggcgacgttgcgccctggtcagcttagcgatgatattcctgcgctgcgagaaatactggatcgcagtggcatgctaaacgccgctccagccgctccggttaagtcgccggaagtgattccgatggataatcctgcggtcgccgcagttaacgacgatttatccgtcgatgaagaaaaaactcgtgcgcaggctcattcgctggtagttagcccggcggcggccccgatctctgaaatggtcacttctccgcagactccggtagctaaacattccggcagtgcgctgagcgtgaccgacaatcaatacaccgaagatctggtcgcggcggtaaaacgcttccagcaatggcaaggtctaaccgatgatggcgtgattggtccgagaacccgcgaatggctcaacgtttctccgcaaatgcgagccagtctgctggcgttgaatattcagcggctgcgtattctcccggggcagatcgacacgggcatcatggtgaatatcccgaactattcgctgagttactaccagaatggtactgaagtattgtcgtcacgcgtgattgtcggccgacctagccgtaaaacgccgctgatgagtagcgcgctaaataatgtggtggtcaatccgccgtggaacgtgccaacctcactggtgcgtcaggatatcgtgccgaaagcgcgcaatgattccagttatttccagcgtcacggctatacggtgttatctggctggagcaatgatgcggaagttatcgttccttcaatgattgattggagcacgatctcgccgaataacttcccgtaccgcctgcgtcaggcgccaggagcgtctaactccctggggcgttataaattcaatatgccaagttctgatgccatttatctgcatgacacaccgaaccacggcctgttccagaaagatattcgggcattaagctccggctgtgtgcgcgtgaacaaggcctccgatctggccaatatgctgttgcaggatgcgggttggaacaatgcgcggatatcatccacgttaaaacaaggggataccacttacgtgaatattcgtcagcgtattccggtgcaactgtattatctgacggcgtgggttgcggacgatggtaaacctcaattccgcacagatatttacaattatgataaaacggtgagatcgggtgcacaaatcacaccacaagcagagcttttaatacaataaatgcagtaaaactcaataactaatggtctgaatacttggttgtctgacaggcgctcatttttgcgagcgcctaggaaccttcgcctcacgcgggttgactggttttccgcgggcggttatggttcggggcggtgcgttttgcgcttacttttgacattattgccgggtagaaacgatcatggataaaatcgacaatcatcgccgcaagtggctaaccttaggcgggacagcgctgggcctttcgctgttaccagggcacgcattcgcgaccctttctactccccgcccacggatcttgaccttaaataacctgaatacaggtgagtctatcaaagccgaattttttgacggcaaaggttacaataaagaagaattgagtcgcttaaatcatattttccgcgattatcgtgccaacaaagttaagcccattgacccacgcctgtttgatcaactctaccgcttacaaggtctgcttggtaccaccaagccggtacagcttatttctggctaccgttcgctaaataccaataatgaaatgcgtgaacatagccgaggcgtcgccaaacatagcttccacaccttgggtaaagcgatggatttccatatcgaaggtattcagctaagtaatatccgtaaagcggcattaaaaatgcgtgcaggtggtgtaggatattacccacgtagtaactttgtgcatattgataccgggccggcgcggacctggtgatcagcaatattcagccagtgggatagctttatcggttaggccactggagttggagccttatgaaatatcatattattccggtaacggcgttcagccaaaattgtactttgatttggtgtgatgcaacattgcaggctgctttggtcgatcccggtggcgacgccgaaaaaatcattgctgaagtgcgtcgtttgggcgtcacggtcacgcagatcctgttaactcacggccatttagatcacgttggcgcggcggcagaactggccgaattctatcaggtgcctatcatcgggccggaaaaagaagatcgtttttggttggaaggcttgccagcacagagccgtatgttcggtctgggggagtgtcagtcgtttgagccaacgcgttggttggaagaaggtgatgagataaatgtgggcgaaatgcggttatcggtgcttcattgtccggggcataccccggggcacattgtctttatcaacccgcaggcgaggttagccttaaccggcgatgtgattttcaaaggcggcgttggtcgtagtgatttcccacgcggcgatcatcagcagttgatcgactccatcaaacagaagctactgcctttgggtgatgatatggcgtttattcccggtcacggcccgatgtctacccttggccatgaacggcagagcaatccgtttattatcgacgaaccggccatttggtaaatggttctaccctgcagtagatgttctaaaggcgccgattggcgcctttttaaatgtgttttgatcgaataaggtaaacccgagtattttcctcaagaaacgataaataaatttgtgtaatatccgcagcgaacaatactaacagtagtatggtctcgaatgatgttgggctaacctcgaagattaatttattagccagctttaccgtagaggaaataaataacaatcattttttcttatagcagctttatagtcgtttcatggaatttactatgccatttcgtcgttccagtttaagaaagttgttgccccgattgggactatcctttttggtgttgctgctgtttatcctatttggtgctggcgttatttatgtgcagacagttaataatatgcactcagacgccgaaactaagttaaagcatgctcggcaaatgattgaccgtatttttgataatgctcatcttgccgcgactcgggtacagggcagcctagggcaaccttgcttacaggtagttcaaaatttacgcgatcaggtggctacaattcccgacgtccgctcggtaaatttaactcgacggggcaaccagatttattgcacttccctttatggcccttatgacgattacgtcaattcatcggcttacgttgatggtcagctatacctgatgtcgggaaataaagtgacgccttcacgaccggttgtgatataccgacaggtggccggggactacagcaccctggttggcattgatggttattacttacataatattcttaacctgctgagcggggatatacagctcagattgattatcggcgatcgttggatggatgccgcgggaaatacccatgcaggtaacccattgcataaaaacatgccgttgactcttgcttcggaaaaatatgcgtattccatctcaactaccctgactcatggccagtatctagcctatgcctggcaatatgccaccggcagcttaatatttttccctctgttaggttttatttccgcgtttctggtattccgtttgtgcggaaaatcctcttcgccgatgcagatactcaatcttgcgttggaaaacggggagttcgtgccttacctgcaaccggtagtgactgggaaaggggagcactgtatcggttgcgaagtgctaatgcgttggcataacccaactcatggcatgattcagccagaccgttttattcctctggcagaagatagcggattaattgtgccgatgacacgctctattatgcagcaggtcagcagtatgtttgctccttatgccagccagctaccggatgatttccattttggtttcaatatcagtgccgaccattgtcgtgatttaagtctggtagatgactgccgcgcatttattgccgcctttgcagaaaagcctatcaatattacgctggaactgaccgagcggaaattgattgttgccgatgaaattaccgatcgtttgttcgctgaactgcatgccttaggcgtatttattgccatagatgactttggtaccggccactctagtctggtgtatctgcaaaaattcaaagtagacttcctgaaaattgaccagagcttcgttggaatgatcggttctgatgcgttatccagcatcatcgtggagaatgtcatcgatctggcaacgaaaatggggttgatgacgatagcggaaggggtggaaaacgaaacgcaggcgcgttatctgcaagcgtgtaatgttgactatctacagggttatctatttggccggccaatgcctatggctgagtttatcgaaaaaaatatcaatcaggcgaccttcgaagaagcggcgtcggagctaaaacctaaaaagggtgcctaaggcaccctttaaccgcaatccactgaaaattgaatcagagtaccgcgacgatggcttcacacagtggagccatgttgtctggtgtcatgcctgccacgttaacacgacctgaattcaccgcatacacgccaaactcattacgcagacgcagcacctgttctttggtcaaaccactgaacgagaacatgccgttctggttaatgatgaaactgaagtcctgttttgcccctttctcttgcagggtattaacaaacagttggcgcatccgatggatacgttgacgcatatcggtcagctcttgttcccagatagcacgcagcgcgtcattactcagaatggtagcaacgactgaggcgccgtgagccggtgggttagagtagttagcgcggataaccgctttgacctggctgaaggatttctccgcgatatcgctgtctgccgcaacgatggtgcaggcgccgacgcgttcgttgtacaggccaaagtttttagagtaagagctgcaaacgatcagttctttatggctagcggcgaaaatacgcaggccctgagcgtcttcttccagaccacgagcaaaaccctgataggcgaagtcgaacagcggcagccagcctttagccacagacagttcggcaagtttagcccactgttcgtcggttggatcgataccggtcgggttatggcagcagccgtgaaacagcactatgtcaccggcttgggcttctgacaggcttttcagcaggccatcaaagtccagcgcgtggttggctgcgtcataataattatattcaaccacttccagaccggcagcggagaatacattcttatggtttggccagcttgggttactgacccaaacgcgtttagctgaagtttggtgagcaataaagtcggctgcgatacgcaatgcgccagtgccgcccggagtctgcgcagtgcgcgcacgtttttccgttacgattgggctttgtttaccgaacagcaatgcctgagtgcagctggcgaagaccggcaggccgtctatacccagatagttttttgttgtttcgttttccagcaaatactgttcagcttttttcacgctggtcagcaccggcgttttaccggtttcatctttataaacaccaatacccagattgattttatttgggcggtcatcggcgcggaaaatatcggtcagacccagaataggatcggcaggtgcagcagtgattttttcaaacatgtcagatgcttccatggcttagagttaagcggacagaatcatcagggtagcgccagttcagggctttgccaaccgtttgcgagaaaaagagatcaatcttgtgaggcggggtgattacgggtgaaaaatcgtcagaattactcaggaagtagcagattatgcacaatgtgagtcagggtttaaaagtaaaatacagaaagcaaaaggcagagccgaagccctgccttttttacttacaccaaccgagttggcattaagtcggacaacttagaactggtaaaccaagccaacacccactacgtcatcagtgttgatgccgttagcaacggtgaagtcatttttgtccagcatgttgattttgtaatcaacgtaggtagacatgtttttgttgaagtagaagtaagtagcaacagaagcatatttcaacaggtcttggtcattaccgtaaacgctgttcagatccttacctttagactggacgtaggccagggaaggacgcagaccgaaatcgaactggtattgcgcaacgatttcgatgttctgagttttgttagcgatagtgttgctagctgaaccgtatggcgtggtgttcagcgtttcagcatacattgcagccaggtatacgttgtttgcgtcgtatttagcacctacgttccatgactgagctttgtcgccttcagcagtggtgaagcgtttctgggtatcagtacgattagaagaagcataagctgcaccgaagcttacgccgtaaccgatatcataggtagaagagataccgaagccgtcaccgttttcaactttaacgtcgttacggccttcttcgtttttgccttggtattgcagagcgaagttcaggccatcaaccagaccgaagaagtcattgttacggtaagtcgccagaccggtagaacgggcattcatgaagttgtcagtcttagcgatagagtcgccgccgaatactggcagcacatcggtcgctgagctcacgtcatagagtacgccgtagttacgaccgtagtcgaatgaaccgtagtcaccaactttcagaccagcaaagcccagacgggttttgttgcctttgtcgccctgagattcggcgtggttagcctgaatgttgtattcccactggccgaaaccggtcagttggtcagtaatttgggtttcgcctttgaagccgagacgaacgtaagtttcgtcgccatcttcgcctgcgttatcggagaactgatggcgggcatcaactttaccgtacagatccagtttattgccgtctttattgtagatttctgccgcatttgctgcaccagcagccaacagagcagggattactactgcaagaatattgcgcttcatcattattattaccctcattggtgttattcggacacctgccactgccgccaataatttttttggaactattgttgagagtttggtgtcgtctgtgtctgagacgcagtgttccattcacagaccggttaatccacaccgaaaatgctactaattgacaaaaactgtttcattaaaagacaaagtgttactaaatgtaaaataaagggaactttgtgactaatatcaaactttaaaaaatgacaaaagccagcataagctggcttttttttagacaactaacagaaatcaattggaaatgattaatttagaagctggcgtttctgggggtacgtgggaacgggatcacgtcacggacgttttgtacgccggtcacataggcgatcaaacgctcaaatccaagaccaaaaccagaatgtggcacggtgccgtagcgacgaagatcacgataccaccagtaatcttctttattcaggcccatttcttgcaaacgttggtccagaacatccagacgttcttcacgctgtgaacccccgatgatttccccaatacccggcgctaatacgtccatcgcggctacggttttaccatcttcgttcatacgcatatagaaagctttgatgtctttcgggtagtttttaaccactaccggcgctttgaagtgtttctcagccagatagcgttcgtgctcggatgacagatcgataccccacgacacttcgttttcgaaggtctggccagatgcgagcaggatttcaattgcgtcggtgtaatctacctgcgcaaagtcggagcttacgaaacgttgcagacgatcgatcgcatctttatctacacgctgagcaaagaaggccaaatcgtcagctcgctcgtccagaacggcctggaagacgtacttaagcattttttcagccagagctgcaacatcatctaaagaggcgaaagcgacttccggctcaatcatccagaattcagccaggtggcggctggtgttggagttttccgcgcggaaagtcgggccgaaggtgtaaaccttggataacgcacaggcgtaggtttcaccgtttagctgacccgatacggtcaggaaggcttctttaccgaagaaatcttcgctgaaatcgattttgccttcgtcagtacgcggcaggttttccagatccaaagtcgatacgcggaacatttcgcctgcgccttcggtatcggatgcggtaatcagcggagtagaaacccagaaataaccgttttcatggaagaaacggtgaatcgcctgcgccaaagtgtggcgaacgcgcgcaacggcaccaatcaggttggtacgtgggcgtaagtgagcgacttcgcgcaggtattcgatgctgtggcgcttggccgccatcggataggtatccggatcgtccacccagccgacaaccttcacgctggtcgcctgaatttcgaaactctggccttcacccggagaggcaacgacggtgccggtcacttcaaccgagcaaccggtggtcagatgcagcacttcgtcctgataattcggcagagtattattaacgacggcctgtaacggatcaaagcaggaaccgtcataaacggcgacgaaggagatgccagctttagaatctctccgggtacgcacccaaccgcgtacggtgacttcactgtcaaccgcagcacggccttgcagtacgtcgactacaggcactacgctcatagatttctctctttataagttttggttcagaaataaattaaaacccaaaatatggggatgttgctatgttacttgcggcagtgcaggacacaagaggaaatcatcggattagtgcaagatttctgcggttaagataaataaatcggcggatggcgaagatcgtggctctgtatctgatgctatataaaggagggagagtgaaataggccggatgagggagactcacccggcaccctgcggttagctagccttttgtactaaaggcaaatcaaaggcttcacgcagttcatcaacgaaggctggatcctggcaaatggtttttccagggctgtctgacaatttggccacgggctttccattgcattccaccagcttaatcacgatatttagcggtttgacacccggaatatcacaggtcaggcgggtgccaataccaaagaccagattgatccgctgatagaaatggcgatataaatacagcgccttctccagatcaagattatcggaaaacaccagcgttttgctcattgggtcaattcccagcttgataaagtgagcaatggctttttcaccccattctaccggatccccggagtcatggcgtaaaccctgatagcgagaggcaaaaggcagatcgaaatcgcgcaggaaagcatccatggtaatgcaatcggttagagcaatccccagttgatccggatattcatccagccaggcttgtaaggcaacgcgctgactgctcgccagctcggggctgatttgctgatgagcctggaaccattcgtgtgcttgagtgcccaccggcgtcagagataatcggcgagccagatcgtaattgctggtgccaaccaaataaggaaactctgcttgtaaggtgctgacaaccgcctgctgcacttcaccggagaaacggcgacgggtgccgaaatccatcaatttgaaacgggagatatccacatcaccgcttaattgattgaattgtaacagcttggcgcggagtttctcgatagccatctgcgggacgatctgcggcgagcggtggcgatgcaccacttcgctgataaccgccagcaatggtacttcccacataataacttcacaccacagaccggaaattcgaatatccagtttcccctcgcgggcggatacggtgacctgctgcgggttgaaccgaaaatctcgtaaccaattcagataatcggatttgaagaaggggaggccggacagataggcgaattcgtccttggttaacgccagttcactcataagagcgatctgacgacgaatttcatccacatagtcgcccagcaattcgtcaccgcggcagcggaattccgcagcaacggtaatatggcgataacgatgaaacactgcttgttgcatatgaagcttgtaagcatccgtatcaagcaatgaagtcaaaatcggagaggcgtcttgagtcatggcgcgttacagcatcctcgtaggagcattttccagattcggcataatcaataaagttgcaggagtataccggtattatcctgtgattgaaccctcataacaccataaatggcgtaacaagatctagagttaaacgtgccatcaactttactcgtcggccttttagtctatggaaaataaaataagctaaatattttcgtgacttagatgcaggggttatttattggtcacccgaaatgtagggttattatttgtcattttttattcttaacagaaacaaaatacctggttgatttatcgtcagaaactgcgctattcagataaattttattacagttatttttataaggaattaattgtgtgggaaaaccacaataaaaacggcgtggttgttctgttattaggctaaataaaaccgtttgcggtataaaaactgacccgatctttgccattgcctttgcaataatacaaggcttcatccgcttgcttaatagcccttttcatttctgagtagttgtttagcatggcaatgccgcagctgatacggaacataaccgtggtgccatcttctaatttcagcgtcagttgtttcacttttaaccgtaggttattcatgattcgaattgcgtcctccggcgtacagttacttaatacaatggcgaactcttctccgccgtagcgtgaaaagatatcggtggagcggaaatgggatatcaggagcttactgaattcaatcagcaccttatcacctacatcatggccgtaggtgtcattaagtgacttgaagttatcgatatcgatcaaagcgaaagccatcggataactagcggcaggcatggcttcacacaggttaaacagttttcgacgattataaatattggtcagcggatcaataaaggacgctttttccagctcaccaatcaggttttgtttttcagattcaagaaggactttatctaactgataacggcgcagatctttaattgcgtcggtaatagcaataagatcctgactcagataaaccccctgattctcaatattcatatttccctgagagagctttttgatattcgttgtagtttcagataaccatttattgatattaacgcaaaatatcaggcatgggacgataataaatagagctaataacattccgatggaaagggtactctctactcttatgttactttttaggatgttacttttgagtgattttatttctttttcaaatacttggctattaaatctttgggaaattgagtcaatataatttacatactcataaatatctctgacattgtacttttcgtttttggtcatagagagatataaatcattggcgattttttcgctgttttgcagcgatatcttgccttgtaaatcgttgactacgtgactcatctgattgagtctgtatgttttttcgataaaaccgaaacgaggttgcagcgagtagagcacgccggtaagttggatcgctttaagatagggctctggtcgctgaactttggctaaattgatatcaacgatctgatcgactaaatcggtaagggtcataaccaaacggctatttattctgatggcttctaggaagatatatgattcagattttatcagacggttgtcgatagtataaagcgagtatttctgtttgacctcagagatataaaatgcattattcaggtcatagagataactattgaccaaaggcattcctgaacttgcacgcaaatcattggctattaatttatccatcagttgaaccgaagaaattaccaggtatttataagtggctcccagtttttcaaccataattgaattggcattttttttaaatatcgctattttcttagtggcagttattactgcctgattgatttcttcctggtttatatcggttttgattaaactgattttttttaagcgatgcatgtgcaatacggcctgaaatgcctcggtaaattcttgtaatcgctcaattttatacaggtttaatttattgttttctgcgatggcgctattgcgagatatgttggtgtaaacgaatacagagaaaaatagcattaatgaaagtgtgaaaaaataaataagatattttactctcatagccgtattgttcccgatcagccttcgttgtgcattacaccacttactccgtcatatccattcgaatcagcttgttggtgatgagctattgcgtgaatgataccactctgagattaaacttaacgagagatatttctgatactgtcagtcgtatttttacactctatttctattctagttcattttgtccacataccttggagccgacacatattccgcaacaaaaaacaccaacggcaacgagtgttatgctgagtaatagccagacaataaaataaacagagtatttggttttcaattacctgacggctatcaccttgaccagttggggtcatcgtagttatccctgcgatacctgttgttcatagaaatccttcaggttctcaactgggttttttttacagctgtgatacatttaaattcactctgagtctggatggaaagtctctgtagtacagagattccgccatctgagtacaaaaacaccagaccgggtaatcatattcactgatgacgtcaaaagggtttttatgacacaacagccgcaagccaaataccgtcacgattatcgtgcgccggattacaccattaccgatattgatttaaatttcgagttggacgcgcagaaaacgacggtaacggcagtcagtaaagtaaaacgtcagggaaccgcaggtgccccactgatcttgaatggcgaagacctgacgttattaagcgtcagtgtagatggtcagccgtggcctcactaccgtctacaggacaaaactctggttatcgaagaattaccggagcagtttactttaaccatcgttaatgacattcacccggcgaccaatacggctcttgaagggctttatctttccggcgaagcgctgtgcactcaatgtgaagccgaaggtttccgccatattacttattatctggatcgtccagatgtattagcgcgttttaccacgactattgtggcagataaagctcgctatccttatctgttatccaatggcaatcgtctggaacagggcgaattggctgatggccgtcattgggttaaatgggaagatccgttcccgaaaccaagctatttgtttgctctggtggcaggtgattttgatgtattaagagacacctttattacccgttcaggtcgggaagtggcgttagaattgttcgtcgatcgcggcaatttggatcgcgccgattgggctatgatttccctgaaaaattccatgaaatgggacgaaactcgtttcggtctggaatacgatctcgatatttatatgatcgttgccgttgatttcttcaatatgggcgcgatggagaataaagggctaaatgtcttcaactccaaatacgttctggctaaagcagaaacggctactgataaagattatcttaatatcgaagcggttattggccacgaatatttccataactggaccggcaaccgcgtgacttgtcgcgactggttccagctcagcttgaaagaagggctgacggttttccgcgatcaggaattcagctccgatttgggttctcgtccagtaaaccgtattgataatgttcgtgtgatgcgagccgcgcagtttgcggaagatgccagcccaatggctcatgctattcgtccggataaagttatcgagatgaataacttctataccctgacggtgtatgagaaaggatcggaagtgatccgcatgatgcatacattattaggcgaagctcagttccaggccggaatgcagctgtatttcgagcgccatgacggcagtgctgccacctgtgatgattttgtgcaggcgatggaggatgcgtccaatgtcgatctttcgctattccgtcgctggtatagccaatccggtacgccgttagtaacggtacgcgatgactatgatgcggaaaaacatcaatatcacctgcatattagtcagaaaaccttgccgactgccgatcaggccgagaagttacctctacatattccgttcgatattgagctttacgatagcaaaggcgaagtcattccacttcagcgaaacggtttgccggttcatcatgtgctgaatgtgaccaaatccgaagaaacctttacctttgatcaagtgccttgcaagccaacgccttcgctgctgcgggagttctctgcgccagtgaaactggattatccgtatagcgatcaacagttaactttcctgatgcagcgtgcgcgcaatgagttttctcgttgggatgcggcgcagaccttgctagcgacctatttcaagctgaacgtagcgaaatatcagcaaaaacaaccgctttccttgcctctacatgtggcagatgccttccgcgcggtattgttggatgagcagctggatccggcgttagctgcgcaaattctgactttgccttcagagaacgaaattgccgagttgttgacgactattgacccagaagcgatcggggcggttcacgaagcgattactcgttgtctggcgcaagaattagccgacgaactattggcagtatatctggctaatcagacgccggaatatcgggttgagcatgcagatattgctaaacgtgcgttgaaaaatacctgtctggcttatttagcgtttgctgacgccgagtttgctaacaagctggtttctgcccaatatcatcaggctgataatatgactgattcgctggcagcgctgtctgcggcggttgcggcgcagttgccgtgccgtgatgagctgttggaagccttcgatgtacactggaatcacgatggtttggtgatggataaatggtttgccttgcaggcatccagcccagccgatgacgttctggaacgggttcgcgcgttgctgaagcatccgtcctttagcctgagcaacccgaaccgcacccgcgcgctgatcggggcgtttgcttcagctaatccggcggcattccacgctaaagacggcagcggttatcagttcctggttgagatcttaagcgatctgaacactcgtaaccctcaagtcgcctcacgtttaatcgagccattaattcgattaaaacgttatgacgccgaacgtcaggccaagatgcgtcaggcgttggaacagctcaaaggactggaaaatctgtctggcgatttattcgaaaaaatcaccaaggcgctggcagcgtaatgcgataatcagcgattgacgggagttaaactcccgtcaaagcaaggatgtttatttcttgaacctgatgatgaattttgccgattctacagtgatactacctacttatttcatacaccgtttttatttacagcgctgagttgatcttgtttttcttgcctgtgctcaatttaatttaaagatagaatatattactactcatttgaaatgccgaaacgtgtttaagtttctgttattctgatgcggaatagtggccatatttttaaataatggaattgaattaaccttcataatagacttaaatatggcaaataatattttcttgacgataaatggaactgcgcaggggttaatatcttcaggttgtttgacgcaagactccatagaacataagcaaccaaattggtcatgaaaatgagatatttgtttactagttttcgcatagcataaaatgaattatttcatcttaagtttgatttctaacgcacatcgccaaacggcgctcaagaaaagtaggctagcatagagtggagggatgcgatactaacaggcctaaacgttaattatccgaatagcttgagtcatgggcatcgcagccagaagagcttacatccgttcaatattaagatattatttgcgaatatcatgcggctggcatatcaggtcatggcttatggtaaaataaaaaccactgatttataacgtattttctcaataggaaaatgcataaacgccaatgccgagaaatgccaggttttctcaaggtcagtgtacccattctgttaagtctttagcgtttttgacaaatatcattggcctgtttggtctcgatttccaatatgtcccatacccttgagtagacaaagttgtggtgaggtgaaaatgaaaaatagtcacgagtgcaagaagaaatatcgtcatgtaggccaataaaagcatatgttttaaattctatgacgttactctttcctgtcatcaatatatatgcagatattatcataatacatataagtgaatccgcaaccatatagttggcaaggcgatataacgacgcgaaaacggggtgtgacagatacgggaatatttctttatttaaaacatagagaatcatccataaacctaatagagcaattcctaacagaacaatgaaagaaaaaaaagactcactttatctgtaatggattattttctacttatactgtttttcatattcttttattcagcagtatttccgctataggtaacagcttggcgaatctaatctatcaccagcttcgctagcatgattacctctaaatcgtcagcttaggtggcattgaatcgacattaccctgaagagagacattgtttttaggcatgaaaggaacccttggcgcggttggttttactcattcctgaccaataaatacacccgacattaacaagtgatgatcaaaataagcctccggtagcattcttttcagggctttacttagcaaacgtttactttgtgaaaggatatatttaccattcgtgcgtttatccactcggtggagagttcgtcccgcttgccgctggcgaacgttgccgatagaaaacgttatcgatagaagaataggctgaagaactcgcgttttcattccattttcctcagtcacttgcttgtcaccgggagcataggagatcacatgttttatccgatcgttaaaaaggcactgttccagttcaatccagagcgcgctcatgaactcactttccgtcaattaaaacgtattacgggtacgccgctggagtttttagtgcgtcaatcggtgccgacgaagccagtgagctgtatgggactgtcatttaaaaacccagtaggtttagcggcgggtctggataaaaacggtgattgcattgatgccttgggcgcaatgggatttggctttattgaagtggggacggtaacgccgctgccgcagccgggaaatgataaaccgcgcttattccgcgtccttgaagctgaaggcctgatcaataggatgggctttaataaccttggtgtggataatctggtcgataacgttaaaaaatcacattttggcggaattcttgggattaatatcggtaagaataaaggtacgccggtagagaatggtaaagatgattatctgatctgcatggataaagtttatccgtacgccggttatattgcgattaatatttcgtcaccaaatactccagggctacgttcattacagtatggggaagcgctggacgatctgctggcggccgttaaaaataagcaggcggaactgcatcagcgtcatcataaatatgtgccagtcgccgttaagatcgctccggatcttactgaagaagaattgatccaggttgcggatagtctggtaaaacataatatagatggcgttattgctactaataccactttagatcgttctttgatccaaggtttaaattattgtgaacaaagtggtggattaagtggccgcccattgcaatctcgcagcaccgaagtgattcgccgtttgtcgcaggaattgcagggacgtttgcctattattggcgtgggcggaattgattctctgatggcagccagagaaaaaatggcagcaggggcttcactggtccaaatttattccggctttatcttccgtgggccgggtttgattaaagatattgttactcatatctaattatttctcttgattttcgtctgggggtttatttattcccccagctcgtctatattttatccgttagtttaaataaacatcgataaatgtaaatgaattgagtttgattagataaccggacaactcaattattgagcggtaaatgttggcagtgggatgggaaggaataaaatatgcggattaaacctgacgataaatggcgttggtattttgatgctgaacacgatcggctgatgctggatttagccaatggtatgatatttcgttctcgcttccctgctaaaatgttaacgccagatgcatttagtgaatccgcattttgtgtggacgatgctgctctttattttgaattcgaagatcaatgtcgccaaattaaattgagccacgaacatcgtgccgaactggtattaaatgcgctggtggcattccgtttcctgaaacctttaatgccgaaaagttggtattttgtgcaacaggcaaaagttttaacgccagaaaatggcagcctggcgttagtgaaactgatggaaaccggggaagaggttagagtattagtggttgagtccggtgattccgctagcttatgtttattggctcagcctcaattacagctggcgggcagaaccttgatactaggcgatgcgattaaaattatgaacgatcgtttattgccattagtgatagaaaataccgatattcaggcgtttgaccgggcggtctgattgataatgactgcttgataagattaatgccatccgcccaatttcggtttgttctttcgaggctatttccccgtcagtgagatatcaccttttggcacacagctgcacgccagaataacgccattttctgcaatagcactttgttttaacggtgccacttcaccctgcaacaatgtcactttgcagctaccgcatattccagcccgacatgaataaggaatgcgaatactttgctgttccagttgctccagtaatacctgctgattattaccagtaaaacgaataccgttatattcaatagtgacggcgcgagtactatcctgcaccatcggtaaagcctccgccacgacgccagcgccataagggcggggcggtttggtcgccagaacttcaatattatcgccgacgcgaataatgccgctattacgtgcaatcatattctgaccaaaatccacatcgccattatctgcagttcggaatttctgtagtgtagttaaaggttcggcggtaggatgcttttttccacgctcaacgctgacggtggtcaaaatacagcggctgcatggtttcaccagatcgaaaatcacatcgccgacgcgaatcacctgccagctatcttccgcaaaagcgctggcgccggtgacgactaaattcggccgaaactgttcaatcttaatgctgccggggcatcgttgctgtaattcggcaaaagaggcttcattaatcagcaaatagggatagccatcggcgaaggaaagcggaatttctggctggcgtttcacccgacgagtcagttccggcccaagccagcgtaattgaacttcgcgttggaaatagccgctgagccagtcatttatttccgcaggggcaatcagagcggtaaaatgatttccccatacttcggtgggtgccgcagtgggggaaaaatcattaaagcggatactggcgctttcgccgtctggcgcggtaagaaataaaccgtcaaccagcagcgccggagtaaaagtcaccatcttcggattattacgagctgtaataaaagtgccatccggttcggtgatcatgaatacccggtcaaaagccaggccgctactgccgacctgagcatgggaaagctgtaatccacgcatggattttaccgggtgaatgtaaagtttagagagtgtgatcaccatgtgctccatgcgtgtatgaaattagaagggagcaactttatgacaagcggacaggattagctataatgcgcaacaattttatttttggtgatagtgcgatatgaactctttgtttgccagcacggcgcgtggactggaagaactgttaaaaagcgaactcgaagcgctgggtgcccacgactgtaaaatagtgcagggtggggtacattttcagggtgacgatcggcttatgtaccaaagtttgctgtggagtcgtttggcttctcgcattctgctgcccctgaatgaatttaaggttcacagcgatctggatctttatctgggtgtgcaagctatcgactggccgtcgatctttggcgtggacaaaacttttgccgtgcattttagcggcgtgaatgaagaaatccgcaatagtcagtacggcgcattgaaagtaaaagatgcgattgtggatagcttcactcgcaagatcgatcaacgcccaacggttgccaagcaacagccggatattcgggtgaatgtgttcctgcaacgtgacaccgccagcgtggcgttggatttgagcggcgaaggcctgcatcagcgcggttatcgcgatctgaccgggcaggcaccgttaaaggaaaacttggccgcagcgattattctgcgctctggctggcaggcaggaacgccaatggtcgaccctatgtgtggttccggcactttgctgatcgaagcggcgatgatggcttcggatcgtgctccgggactgcatcgccaccattggggctttactgcctggaatagttttaacgaagagttgtggcgcgaactgacggcggaagcacaggtgcgtgctcgccgtggcctacaggaaaccacgtcccgcttctttggctccgatatcgatcgtcgggttattgaaatggcgcgtgccaacgcccgccgcgccggtgtagcggaattgattacgctgaatgccaatgacgtcagcaaactggttaacccgctgccggaaggtcctgtagggacggtgatcagtaacccgccgtacggggagcgtttggaaagtgagccagcgctgatcgccttgcacaatatgttcggccgtatcatgaagacggcgtttggcggctggcgtttatcgctgttcagcgcctctccagaactgttgagctgcttgcaattgcgtgccgagcgtgaatttaaagcgaaaaacggcccgctggactgtgtacagaaaaactatcagctggcggctaacccgcagggcgccagcggcgttcaggtggcagaagattatgccaaccgtctgcgcaagaatgtgaaaaagctggataaatgggcgaaacagcagggtatcgaatgttaccgtctgtatgacgcagatttgccggattacaacgtggcggtagatcgctacggcagtaaagtggtggtacaggaatatgcgccgcccaaaactgtcgatccgcaaaaagcccgtcagcgcctgttcgacgtgatcaatgccactctggcggtgctgaatttaccgtctaaccaattggtattgaaaacccgcgaacgtcagaaagggaaaagccagtacgagaaactggcgcagaaaggcgagttcctgctggtggaagagtataacgccaagctatgggtgaacctgactgactatctggacaccggtttgttcctcgatcaccgtctggcgcgccagatgctgggcaaaatgagccaaggtaaagatttcctgaatctgtttgcctataccggtaccgccagcgtgcatgccggcttaggtggcgcgcgcagtacgactacggtcgatatgtcccgtacctatctggaatgggcggagaaaaacctgcgggttaacggtttaaccggccagcaacatcgattgattcaggcagattgcctgtcttggttaagtaataccgacgagcagtttgacgtgatttttatcgatccgccaaccttctcaaactccaagcgtatggagaccacgtttgacgtacagcgcgatcatctggtgctgatgaaagaacttaaacggttactgcgtcgtaagggaaccattatgttctcgaacaataagcgtggtttccagatggatttggccgggattgaagccctggggctggtggcaaaagaaatcaccgctcaaacgcaatccgaagactttgcccgtaatcgtcagatccacaactgttggctggtaacccatgccaacgaggaaaagtagaaactatgtcgttaattagcatgtcaggtgcctggctgtcgttcagtgatgcacctttgttagacaataccgaattacatattgaaccgaacgaacgcgtctgtttggtcggtcgtaatggcgcgggtaaatccacactgttgaaaatcctgagcaaggaaattgcactggacgacgggcgcattgtgtacgaacaagatctgatcgtggcgcgtctgcaacaggatccgccgcgtaatgtggctggcaccgtgtttgacttcgttgcggaaggggtgcaggagcaggcggagcatttgaaagcctaccatgccactttgcatcaggttgagctggatccaagcgagaaaaatctgaatcgtttggcggcgttacaggaaattcttgatcatcagggcctgtggcagttagatagccgtattcatgaagtgctggaacagttgggtctgaacgctgacgccgagctgtcctccctttccggcggctggctgcgtaaagcggcgctgggtcgagcgttggttagttcgccaaaagtattgttgctagatgagccaaccaaccacttggatatcgaaacgatctactggctggaaggtttcctgaaagagtttcagggtagcatcatctttatttcccatgaccgttcatttatccgtgcgatggcaacccgtattgtggatctggatcgcggtaaactggtgtcctggccgggtaactacgagctgtatctggcgagcaaagaagaggcgctgcgggttgaagaactgcaaaatgctgaattcgatcgcaaactggctcaggaagaagtgtggatccgtcaggggattaaagcgcgccgtactcgtaacgaaggccgcgtgcgtgccttgaaagcgttgcgccaggagcgttctgagcgtcgtgaagtgatgggcaccgccaagatgcaggtggaagaaaccgtgcgttcgggcaagattgtcttcgatctggaaaatgtcaattatcaggttggcgataaagtgttggtgaaaaacttcaccgcgcaggtacaacgcggcgataaaatcgccctggttgggccgaacggctgtgggaaaaccactttgctgaagctgatgctcggccagttacaggccgatagcggtaaggttcactgcggtaccaagctggaagtggcttacttcgaccagcaccgcgctgaattggatccagagcgcaccgtgatggataacctggcggaaggtaaacaggaagtgatggttaatggccgttcacgtcacgttctgggctatttgcaggacttcttgttccatccaaagcgggcaatgacgccggtgaaagccttgtccggtggagagcgtaaccgcctgttattggctaaactattcctgaaacctagcaacctgttgattctcgatgagccaaccaacgacttggacgtcgaaacgttggaattgcttgaagagatggtggatggctatcagggcaccgtattgttagtcagccatgatcgtcagttcgtcgataactctgtgaccgagtgctggattttcgaaggcaacggcgaaatcagcagctttgtgggcggttattacgatgctcataaacagcgcgctgaagccaagccgattcgccaggctgcgccgaaggtagaaacgcctaaagccgctgccccggaaaagaatacagcgtcggctaagcgttcgacaggtaaactcagttataacttgcagcgtgaactggatcagttgccgcagcagcttgagaaactggaagatgaaattagcgcattacaagctcaggtgagcgatgccaatttcttctcccgtcctcatgaggaaacccagcaggtgctaaaagcgctggccgccgcagaacaaacgttggaagtggcttttgctcgttgggaagaattggaagcacagaaaaacggctaattaaagcgggggagcgtagggctattgctgcactccactgacttaacggctgccataccgttctgttgccaatgcgtaaaacgaattgtgtagcagaacggtattttttggcgctgaaatattgccgtgaaggagagttctattgtgttctgttagccatcacgatcacggccatcatcatgttgaaagtaatgacgcgatgctgtgcccgcagtgcgatatgctggtggcattgccgaagttatcttatggcaccaaagccgtttgcccgcgctgtaaaacaacactgagtatgcggtgggaagaaccgcgtaaacggcctataggctatgcgctcagtgcgttatttatgctattggttgctaacctgttccccttcgttaatatgcgggtggcagggattaccagtgaaattacgctgattcaaattcctcgcgttatgctgaacgataattacgccagcatggcgacgctgttcatggtgctggtgcagttaatccccgcattttgcatgatggcgattatcctactctgttcaggtactcgcctaccgaaacacctgaaaaccgtgatggccaaagcgctgtttatgttcaaaacctggtgtatggtggaaattttccttgccggtgttttggttagcttcgttaagctgatggcctacggagatatcggtatcggcagcagttttgtgccttactgcctgttttgcctgctacaggtgcgagcttttcaatgtgtggatcgccgctggctgtggcaggatatcgaaccggctccggcgataaactgcgagctgacctttggccgcacggggatccgtcagggcgtgcgttcttgctcttgctgcaccgcgattttgccggtcaatcaacgagaatgtccgcgttgccacacccgcggctacgcccgtcgccgccatagcctgcaatggacgatggcgctgctgataacctctatcctgctgtatattccggcaaatctgatgccaatcatgatcaccgaagcgctcggtaatgaaatgacttcgaccattatggccggtgtgattttgctatggggagaaggttcctatccggtggcaatggtgatctttatcgccagtattatggtgccttcgctgaaaatgctggccatcggctggttgtgctgggacgcgaaagggaagggcaaaactgatagcgaacggatgcattttatttacgaagtggtcgagtttgttggccgctggtcaatgatcgatgtttttgttattgcagtgctttcggcgttagtccgcataggccagctcatgagtatttatccggctataggcgcattactattcgcaatggtggtgattttaaccatgctggcagcattgacctttgatcctcggttaacctgggatcggatgagtgaaacaaccaagaaggagccgcaaggtgacggacagtaacccaagccatggtgtggcagagatagaaaaaatcaaacgctggtctccggtgtggatcattccgatagtgaccgccctgatcggcgcgtggatattgttttaccactttagccatcaagggcctgaggtgactttatatacgcaaaatgccgaaggcatcgaagcgggtaaaaccaaaatcaaaagtcgcagtgtcgatgtcggcacggtagaaatggtgactttgagtaacgatctcaatcaggtcatcatcaaagcgcgtttgaattcaggcatggagaagttactgcgtaccgattcagcgttttgggtggttaagccgcaaattggccgggaaggcgtgtcaggtctgggtactttattatctggtgcctatatcgagctacagccgggccgcacggataaaagccatgatgagttccatctgcttgattcaccgccgttagcttctccggatgccaaggggttgcgtatcgtgttggatagcgatcaggcagggcaattgaacgccggcgatccggtgctgttccgtggttatcgcgtgggttcggtagaaaccggttctttcgacccaacgtctcgcttaatgcaatatcagctatttatcagcgcaccttatgacagtctggtgacttccaacgtccgcttctggaaagatagcggcgtggcggtggatttatcctcgcagggaatgcgggtggaaatggcctcgctggcgaccttattcagcggcggcgtcagtttcgatgtgccggagggggtcgctttaggtaagcctgttactcaggataaaactcagtttaaactgtttgataatcgcagcagtattcagaattccttgtttaccgaacatgatgatttcctgctgttcttctctgactctgtgcgcggtttgcaggctggcgcgccggttgaattccgtggtattcgcgtcggtaccgtaggcgatgtgccgttctatgccgaaggcgtgaaacagcgcctggataacgatttccgtattccggtattaattcgcatcgaaccgggccgtttccgtaacgatctggggccggatgccaactttgagcaaattctaaaaaccgccaaagagcgtggtttacgcgcatcactgaagtctggcaatttgttgaccggcgctttgttcgtcgatttagacttctatccggatgctaaaccgtggaaagggccgcaggacatagcgggttattctctgataccaacggtgagcggcgggctagcgcagattcagcaaaaagtcatgatgacgctggataagatcaataatctgccgttaacgccgatgttgcatgaagtcacgcagacactggccgaaagccagagaaccatgcgtgaaacccagaaaacgttggcgtcgctgaacgagatcacctcaagtcaggcgatgaaagatctgccgcaagatcttcagaaaacgttaaccgagctgaatcgcagcatgaaaggcttccagccgggttcacctgcctacaataaaatggtcggcgatatgcaacgtttggatcaggtattacgcgaactgcaaccggtactgcgtaccctgaatgaaaagagtaacgcgctggtatttgaagccgccggcagccaagaccctcagcctaagaaggccaaaaaatgatgaaatggatgatggtatttatggcgctggtactcagcgcctgtagcagcagcacgtctaaaacctactaccagttacctgcgttaggtacgccggttgccgtcagcagcgacacacaaggtgtgactcggcaactgtggctggaacatgtcagcgtcgcggattatctggccgcgtccggcgtggtttatcagacgaatgatgtgcagtatgtcattgctaataacaatctgtgggccagcccgttggatcagcaattacagcaaacgctggttaccaacctgagcagcgcattgccgggctggctggtttcagctcagccactggacagcgatcaggcggtgttaaatgtcacggtgaccggtttccatggccgttttgacggtaaggcaatagtcaaaggggtttgggtggtgaaatatcagggcaagctgattaagcagccatttgatctggaagtgaagcagagcgaagatggctatgacgcgctgattcgtacgttggcacaaggctggcaacaggaagctcagaacatcgctactcagttgcaacgtattcagtaatattttgtactaattcagtctaagccccttttccttctcattattctgatgacatggcaaggggctttttatttaaaatcataatgttatctctcccctttaaatcaatcacttagtcaattaaacgggcgtagctcacaaatgtgacattggcgtgaatattgcgcattgattttccctgtcaaaaggactatttcttaatcgtggttgtacataaaacagccactgttttctttccagcagacaagaaatgagggataagaggcatgaagagacagaaaagagatcgtctggaacgggcattatcaagaggatatcaggcaggtatttcagggcgttcaagggaaatttgtccctaccaatcgttagacgcccggtctcattggctaggagggtggcgacaagccatggctgacagggctgtgaccgcttaagcggctccctgtgattcgaggataacctccgctttaggcggaggttttcatttcagagacaagactactcagcatagtcttgcttatcgcgacaaaaaactagccctgccaacgtttcagcaaaatactggcgttaaccccgccaaaaccaaaaccgttagaaagcgcataagtcatctggtgagggcgagctttgtcgctgacaatatccaatccggcactggcaggatctggatgggtcagattcaaggtggcgggaacgatttggtctcgcaatgccagtacggtaaataccgtttccaggccacccgcgcctccgagtaagtggccggttgctgatttagtggaggtgacggctagctgactgtttgtgccaaacaggtgcttgatcgcgttgatttcccccagatcgcctaccggcgttgaggttgcatgagcatttaagtgctgaacctgatcgggagtcacacccgcctgccgtaatgcgattttcatcgctttgtaagcgccgtcaccgtcttccgccccggaagtcatatggtaggcatcagcgctggtaccatagcccacaatctccgccagcggcgttgcgccacgagccagagcgtgctctaactcttccaccactagcaggccagcaccttctcccattacaaaaccatcacgagcgctatcgaacggccgtgatgcctgttccgggtgttcgttaaaaccatgagaaagggcgcgagccgccgcaaaaccggccaggctgactttatcaatggccgcttcggcaccgccgcacagtgcgacgtcggcctcgtggttgcgaatcatacgtaccgcatcgccaatggcctgaacacctgcggcacaggcggtaaccggcgcgccgattggccctttgaaatggtgtttaatggaaacgtggccagcggccagattgaccagaaacgacggaatggtgaaaggagacagccgtttggggccgcgactgtcggtggtgcgaaccgcatgcgcaatcgcggggaatccgccaatacctgaaccaatcacggtcgcggtgcgctcttgttgatcttcggcgattgcctgccagcctgaatgggcaatggcttcatcggctgcagccatggcaaactcgataaaacggtccattttcttttgatctttcggtaaaacggcgcggtcgggatcgaaaccgccttctggatctgctgccagcgtaggaacctgtccaccgactttggttgccagctctcccacgatctcatccggcaaccggcggatacctgattgcccggctagcaagcgctgccagacgatttcgagacctgttcccaatgggcaaatcacgcccataccggtaatcaccacgcgacgcatactcatacaatttccttattcggattcaatggaacgggcagacgccttttcttgcatcaatgcaaggcgtcgcttcacgatatcactgcttaccgggcctgcggcgatggtgacatcctgataaaggataggccgttgggtccgttgatcaagcaactggggctgaatcggctcaccgctgtggcgatcgaccagaatcactgcggccccatccggagccagatgcttattaccccaatcaaacattgccaccaataccggaaaaaaatcgattccgcgttgagtcaggcgatattcatagcgagcggggcgggcgtgatacaaatgtttgtctagaatgccactggcgaccagatgtttcagtcggcgagttagcatggtaggcgaaagctgtaaacttttctgaaactcgtcaaagcgcgacaatccctgaaaagcatcgcggaggattaatatgctccaccactccccaacgcgctctagggaacgggcgaccggacagggcatatcgtcaaaatgggttcgttgcattagctgccggtaacctcacgagtcgagtaaaactaaaatgagaagcaaaacgtcagtcactacatttatagtagtaactatggttcaaaaaaatgccgtttgactggcactgttttcactttactggattacgcagggattgagatgctctctccctgcgcagaaacgtttagaacgcgttagtgtctttaaacaagcccactttcagatcggtcgcggtataaatcaccttaccgtcaaccaatacttcgccgtccgcgacgcccataatcagtttacgcataatgacgcgtttgaagttaatgcggtacgttactttcttcgcttcaggtaatacctggccggtaaatttcacttcgcctacgcccagcgcacggcctttaccttcaccacccaaccagccgaggtagaagccgactaactgccacatagcatcgaggccgagacaacctggcatcactggatcgcctatgaagtggcaaccgaagaaccataggtctggattgatatccagttccgcttccacataacctttgttatgagtaccgccgtcttcggtcatcttcacgatacggtccatcattaacatattacctgctggcaatggtggtccaccggcgccaaacagttcgccgcggccagatgcctcaaggtcttcttttgtataggattcgcgtttatctaccatgttctcagtaagccttattttattgaaggtcgcagattagcgtacacttgtacgctgaacaagtccgatcagccctggttaaaccagttgagccagcgtaatggccaaggtcggcgtcgatcctgtggattcatttgggcaatcctttcctgaattatacctaacaaactggtttgttgttcatcggcataaggcaggccggtcagaagtggtaacgcttcagtgacggaatccacggcccacagatggaattgcccgttctgtactgcttcaaccactgacgggtgcaggcagagatggcgcacattggcgctcggtaaaatcacgccttggctagcggttaatccacgacgttgacaaacctcgaagaaaccttcgattttttcatttacgccgccaataggttgcacattcccaaactgatcgacagaaccggtcacggcaatttgttgattaattggctgttgtgaaagagcactgatcaatgcacataactctgccaaagaggcactgtcgccgtcaatttcaccgtatgattgctcaaaaacgattgatgcggagaatggcatcggctggtcaagttccagctccgcattcaggaatgcctgcataatcatcatgcctttagcatgcagattaccgcctaactcggctttgcgttcaacgtcgacaaattcgccgtcgcccatatgtgccacgcagctgatgcgcgcgggttcgccaaaggctcgcggatggccaggatattccagtaccgaaagaccattgatttggccaacaaccgcaccttcggtgtcgatcagaatctggcccagttcgatttcgtcctgcatccgctcggccagataattctgccgccaatcgcgattatttgcggctacatccagcgagttaccggtaatttcatcttcttcagcatacatggcggcttcggctaactggcgagttaaccattgcgggcagagtggtaaactgccctgatcgccactgtgacgaatggcttgtttaaacaatactggccaagcgtctgcggacaaaggcggcaaattattctgctgtactaacccgttgatataaccgcaccacagcgccatgccttcttcgtccagcaggggcaattcagcttcaaactcgccgtaaatggccagctcacccagctccggttccatatcatggaaatcccctagaccgaggcgatcgccaaccagaaccaaacgcagatcgagaggcatagagggaatatgtaatggtaaaggcttggtttcatcgggagagagccactcgaaacgctgctgagtcaccatttgctttaggcgtagccacattaacggctgcgccagcagggaacgtaccgacagaatcagcacgccgccgttggcctgatggaccaaccccggttgcaagctgaccgtatctttatggattctaacgcaaccaaataattgctctggctcaatccattcctgacataaacaggtagatttggcagcaaaagcctcattgccatgctgagctggctgccagctcacttgatggccatgtaccagataatcaccgcccgctagcgtcggcgtttcatttgccagcaactcattaattgcctgggagagcaggttgagatagtcgctactctcttgcgccttgatcagcataaagcgcggcttggaaagtgggtgacagaatagcgtcaggccattttccaaccggggctgatatgccgcaaaagatacgggagccaactgagtggcggtagcaaacaacgcctcatatggcgttgtgtttggcagcaaagactgccattcaagtcggttattggtcaaagtgttagatgcaatcgtcaaaaagggaaagggcgattatacaagaataacgcaggctgcatatacgcagagtggctgttgtcgacaaggagtgtgacatcctgatatttaagtacaaaaaacagccaaaatgaacgcgatttgcagggggaaatttcctataaagctgttatgcttactgaagttacgcggtcactgaagagatcacgatgaaatatcaacaattggaaaatcttgagagcggttggaaatgggcctatctggtgaaaaaacaccgtgaaggtgaacctatcactcgccacgttgaaaaaagcgcagctcaagatgcgattgaacaactgctgaaactggaaagcgagccggttaaagtccttgagtggatcgatgcgcatatgaatgcggatttggctaatcggatgaagcaaaccattagggctagacgtaaacgccattttaatgccgagcatcagcatacgcgcaaaaaatctatcgatctggaattcctggtttggcagcgtttggcggcattggcgcgcagaagaggacatactttatccgaaacggtagtgatgttgattgaagatgccgaacggaaagagaaatatgccaatcagatgtcatcgctgaaacaagatttacaggcaattttgggtaaagacgattagaaactgaatgagaagcaggcgttatttgttggcgtttcttgcgattctggtttttggttttagatgacgaaaacggttaaaaaaaaaccccgcaatgcggggtttttattaagaagtaaacttaagcctgtggctgagttacaacttctttgatgcctttcacttcgatctctacgcgacgatctggtgccaagcagttgatcagtgcagcacgtggtttcacgttgtcacaggtgttgcctgtaactggatcagcttgacccatgccacgagcagagatcttgtctgctgggatacctttagataccaggtactctacaacgctgcgagcgcgagcttcagacagtttcaagttaggagcagcttgaccgatacggtcagcgaagcccagaactacaacagaaccgtctttaggatcgatagagctcagctgagagtacagttggtccagagcttgctggccttctggtttcagagttgctttgttgaaagcaaacagcacgtcagatttcagagtgaaacgcttagtatcaacaactggagccggagctggagctggagctactggagcgactgcgtcatcttgaccgaaacggtaagaaacacccaggctcagcatgccgttgtctggacgagcaccaacggtagcagcatcaccaatgttgttaacccattggtaatccaggcgagttgcccagtttttggttactgcgtattcaagaccaacggctgccagcggagaaacgccagtgtcgtggttgctagcgtggaagttttcgctaggcacgtttgctttagagtctgcacgccaaaccataccacccagacgagtgtacagatccagatcctgagcaattgggtagctcagtttagcggctagctgaacgccttgtgctttaaatgcgccgttagtaacgtcgcctttgtaaggcatacggccaagccagtcatatcccatttcgaagccaaggtattggttcgcttggtaacctacgaacgcacctgcacccagttggtccttgtgagttgggccgtcgttgctttcgttgtagataccactgccggtaccgacatcatggtactgagaccagcccagtttaccaccggtgtaccaggtattatctttcggtgcggcttgcgctactgtagcgaaaccagccagtgccactgctaatgcgatagctgtctttttcattttacgcctcgttatcatccaaataggcaatgagcttttgtaaagccaagcccttggttaaaattcttcgttaaggttttaacgctcccgttgattcacgctgccagtttaatttggcgttttagagcaaccttagcgatgtaaagtctacaacgtggcgagaaagttacaagtgtgatgtgataaaccgcctgaaaaaaaagcaaaaatgagcaggttttttaacacttttggcataaaaatggtcatttttagaacaatattttatgctgcaagccgcgtaatgactcgctttgcactgatattcagaggttcccatgtaattcacgttaaatttcatgggataaatcctaaatttacttaatgatacaaataagaatgaatttttagcgttggacactgtccttggttcgattttgtgtcactttgcggacgcataatgaacccatatgcatttccctgctcggcagctaagcgaagccttagtcggtcttcatccgttaaatcaggcaaccaaccgagcaccacactgtaatttcctgtctgtagcgctttttccatagcttcaacggtagataaagaatctatctggcttagctgcaccactttatctacgggtaaaccggatttctcaagccataaacggctaagcttctgctgtggtgttaaccatagcaaccagcgggattgtttgcccaattgttgcagcaggggaacgagcagttgaaccactgcggactgattctcactataaacaatttcactgataagtccgctacccacaggggaaatggttcttgttgctaatgtattagcagcaaaagtatgactgttggaattatgaggtttaagtgaatgtgtgcgcatgtgatttcctgcccgtagtgatactgtatgaatatacagtaatgggtgtttgatggaagatcaacctaatttttcaaactgcttcgcaaatttgcgatgaaatttaatgcaaattaattttgtaattggatagtcgatttatattgcgtatttttgcaattagttgttcctcttacacttattgcatcaaaattaggactataggctaatcatttgctaaaggagtagcgatgaagcatttatcagaaaaaaggattgcccaggctcaggatcgttttgcttttctcggcccgattacatttcgttctcaatttggcgggtatggtttgctggctaacggcatcatgtttgcgttggtttctgaaggcgaaatgtatttacgtgcaaacgaacgtaccgaatacacattcaaaacctacgggatgtgctgtttggtttattccaaacggggcattcccgtcacgttgcgctattactggattacgcccgagttatggcaggatgaatccaacctttccgcatttgctcaattggcctatcaaggagcagaagaagatgtcgttaccaaaagcagggaaaccaatcgactgaaagatttgcctaatgtgaccattgctcttgagcgtttactgtggaaagtcggtataaagaatgcggatgaattgaggagtgaaggagcaaaacgcacttatcttaggctcagggccttgaggaagtccttggggatcaatgtcctgctctcattagccggcgctattacaggcaatcatcatgccgttttacctcgtcgaattcgcaatgagctgatggaatggttcgatgatgtaggaatgccggtcagcgcttgttataaaaactgaaggcgatgaacgttcaaccaacgatgagtaacgcgatatgcctttaagtcgtaaccgagtgaagggagtcacaggccgctaaaatatcaacaacctgtgactggcaggtgagtatcaccgcattatttttatgaattacgaatttctctggccaatttgtttatttaatacggcaagctcaggtagcagttccagtaacaatcctacctgctgtaataccagcggttctttgctttcaggatcggggctgaattgcgcgctacgtgccgaaagggcagccagcgctttgttcatgcggatatcgtccaccggttcttcgctaagcgccgcttctacataacagatagcgtcatttagtagctccagaatggctggattggtcagtttctcgcggtgcgcgcctagcgccgagatgtagctcagcatggtgtgattcaggcacagcagtcggaatgccgcctcatgtgttttgcggtcattcttaggctctgcggacatattggaaataaccgaagctaactcagcatcgctattgtgcgcatcgcggcgggcaatcctataggtcaggctgttgtcctttccctgatggtattgcagcaggatggcgtccagatagcggcagttggcgttgaaggtcttgttcaccaccgccggcagatggcggaatttccaatctggccagataaaggaaacggcgacccaggcaatgccgcagccgagtaaggtatcaatcacacgtggcatggcgacctcaaagccttcacctaacaggttgaagcacagtaacaccaaaagggtaataaacatggtggcgtgggcgtactgcacattacggaaggcaaagaacagtaccccggtaatgacgattaaaatcaactgcccttccagagaaggcacaaagtaaagaataggtaagccgatcagaataccagcgagggttccgatgatcctaagagctaaacggcggcgggtggcgttgtagttaggctggcagacaaacaggctagtcagcaaaatccaatagccgtgctgcatgccggtgaattggataaatgcgtaaccaatacagagcactacggacatgcgaaccgcatggcgaaatagggctgactgcggcgtcaggtggcggctgattcggagccagatatcgccccaaccggtaatacggtcgtcggccagacgattttccggcttagcttcttcggccagtacttgctctgattcgataccagcaagctgggcgtcaatggcacgcagatttctaagtaaataggataatgctttaacctctggaaggtttttatgtttttccgacattcgcagaagcgtagcgtccagatgagtaaacgctcgctcaaagcgcgggtcgtgctgatatttttgacgcaagaggatggattgcgataattgctggcaggctctggcctgcatagttagcagccgctggaagcggaacagcacatcgctaaaacgaaatttctcccgcaggctttggtattgcacatgggaggaactggcgcgctcatgaatatcctgtgcgacgaaataatagtgcagtgtacggcgggtgccccgttgcccgcgatctcctttcagacgggttacgagggaaaccttggcctgattcaaggtcgaaaccagttcgccgttggccatggcgacagcgatcagcggctgattgtcattcgcttcgatatcaggatcaaacagattggctttggcttccagataatacgaaagctgctgataacagcgtgccatattgtcctgtagtgggcggatagggaaaatcagatggccagctagcgtcagcaggttgtaccaaacagcccccagcagcaaaagcaacggttgttcataccagatagcgtacatcgatgtacccagcatggtgtaaatcgcgatcagtaaagcgccaaaggcaatggtggcgtagcgttgtccaagcgcgcccagcagaatgaatccgcaggtcgaaaaagtcaggccaatagcaaatagccagggatagggaaagagcaattcaatggaggcagaagcggtaaagaagcaaaccaatgtaatcaataaattgcggatgcgtcctaccagcctgtcgtccagatctgccagagccgcggctacgactcccagagtcagaggaatagtcagtgtgggttggccaagccaccaaggtagcgccgttgcgccagtcagggcgataaaaatacgaacgtaatacaggaagctgctgttatatgcatagcgacgtaaatcagaaacaaaagtgagcacaaaagacccctaaaacgaacaaaacagcctgaccgaattgagcattacctaggctaatcaacatagcttttaggcaaaaaacgaaccttacactcgggcaaaacagattcactcgagcgtaaggcatcattctcaatcagcgttgctgaaagcggcgtttagcattctcggttctggcttgttgcgccatttcaaccgaaaccacccggcggccgactggccataaggctatcgctgctattttaaagttagcgataccgacaggaataccgatgatggttaagcactgggcaatcccagccaaaatatgggaaatgcacagccaccagccaaacagaataaaccagataatgttcaatactgaacctccggttgttagcagagcattacttttttccgggtataattcattgacatggatcgcctcattgccataaggcagaaaggagagcttggtaatttcccagcaagagcgggttaatggtaaggtaacgatcaacagggcgctgaccagcgtagccaccagccaggcgagcgttgtgaagaaaccacctaaaacaaaattcaaaatgttcaatgcagtacgcataatgattaatctgcctgataaaattgaagagccgccatgcgggtgaatctagaagtgatcttccttttcccattattacgcgtttttgacaataacccgtaaactatctgatagctgttgtttaaactcaattattttatttacactccattttgatacgtaaactccctcaatactagttttggcgcaggtatatggaacttaaagcgacatctttcggcaagcatttggctcaacatccctacaatcgggtgcgattattgaatgctggcatcgaagtgagcggtgataaacatcaatatctgattccgtttaatcaattggtcaatattcaatgtaaacgcggcatcgtatggggagaactggagtttgaactgccacagcagcaggttgtccggttacacggcaccgaatggcaggaaactcagcgtttctatcagtatttgttaggcgtctggcaaaaatggagcgaggaaatgagccagattagcgcagaagtgctccaggcccaggtggcttcgatccgtaaaattgaacaacaagataaatggtttaagcattcggatttggcgcaattgcaagaaagcatcaagcaagcatttggcgcgttgccaatgccgatagagcgattaagtgaatttgagctgtgccgcgacgattatgccctgtgcctgcgttggttacagcagggtgcccggagcgttgcgatgcgtaaccgacaatggaccgaccgcgtgctggaacaacaccgcgacttcttccagcaggttgaaacctctcctttgaacgattcccagtgtcgggcagtagtgaatggggaagattcggtattggtattggctggagcgggtagtggtaaaacgtcggtgctggtggcgcgtgccggttggctgttacatcgccaggaagcgctgccggagcaaatcttgctgctggctttcgggcgtcaggctgccgatgaaatgaatgatagaattaagcaacgtttggggacaaaagatattcaggcgaaaaccttccacgcgttggcgctgcatattattcagcagggcagtcgtaaaactccggttatcagtaagctggaatcagacagtcaggcgcgtcgctcgctattgatcaaaaactggcaacagcagtgtgaagaaaagaaagcgcaagccaaaggctggcggcagtggctgaccgaagagttggagtgggacgtgccggaaggcagtttctggcaagataaacgtctggcggcgcgtttgggagggcgtctggaacgttggcttggcctgatgcggatgcacggcggtagccaggctgaaatgattgaacaagccgatgaggaagtgcgcgacctgttccagaaacgcattcgcctgatggctccgttgctgaaagcgtggaaaagtgcgttgaaggacgaaggtgcggttgatttctccggcttgattcatcaagcggtgaatttattggagaaagggcgttttgtcagtccatggaaatacattctggtggatgagtttcaggatatctcgccgcagcgcgcagtgttactttccgctctgcgtaagcaaaatacccaaacatctttgtttgccgtaggggatgactggcaggccatttatcgtttcagcggagccgaactcttgctgaccaccgcctttagtcatcattttggtgaaggagcggaatgtgctttggataccacctatcgttttaacgatcgcattggtgagatagccaatcagtttatccaacaaaatcctcatcagttaaaaaaaccgctaaacagcctgagtaaaggcacgaaaaaatccgtggtaatcctgccgcatgaacagcttgaggcgctgctggataagctgagcggctatgttaaacatgatgagagaatcatgattttggctcgctatcatcatttacgtccggatattttgcagaaagccaaaacgcgctggcccaaactgaatatcgattttatgaccattcacgccagtaaagggcagcaggctgagtacgtgattatcgctggtttgcatgaaggcagcgatggattcccggcggaagccagagagtcggtgttggaagacgtactcttgccgcaaccggaagattttcccgatgcggaggaacggcgtttactgtatgtcgccatgacgcgggctaaacatcaagtgtggttattacaagacagcgatcgcccttcagtctttgtcagccagttacgcgatcttggcgtgtcagtacagaagaaaccctgacaggaaatggttgcccccgcaggctttggcccgcggcgggcggattatttcagacgatcttgcaggtagcgctggtaatcgggaatagcaatctcaatctcccgatcgaatagcggcgagcagacgagaaaatcagcggtagaacggtttgtggcgactggaatattccacactgtggccagacgcagcagcgcttttacatcgggatcgtgcggcaccgcatttaacggatcccaaaagaaaatcaacatatcaattttcccttctgaaatcagcgcgcctacctgctgatcgccacccattggcccgctgagcatactgcgtaccggaatccccgtggcacgttgcaccagatttccagtggtgcctgtggcataaagttcgtgtcgcgccagtagctctttgttgccttcaacccaggcaagcagcgattttttacagtgatcatgagccacgagggcgatatgtttcctcgccgcaacggttcgtgtagtcagttccatgaaaatccttaaataactgaggtttcccgacagattactgaaactggaatttggtgcatagagggagcgcaagaaattgcgagaagggattgaaaaatacgatattcacatcagattctgccgcattcgacttttggccgctttcattggcgagcctgcgcgagagaatagggggttatcctgacaaacacgtgagtcaacagcgcctattgttttgccgcgtgtttcctggcccaaagcaaaaaccgctgttgggtttctttatctgcctgcaaataccaatactgtagcatttgctcagaaacgttctcaccgttcaggcgcgtagttttgtcggcgatgccgttgcctgctgcgggtagcgttgtaccgggcaccgcgctaacggttgaagggggaatcgcggcgaaagagggaaccgaggctttatgattgcctaagttatagattgccatgatgttttccagagaagcgctactggttaaatcatccggatgcagcatatcagaacgtaccggcagaatatgagcattgtgatcaatcagttgatacagcgggtgatgagaaaatttctgtccttcttgcgtattagtaatcgttggaaggtggatggcgacagatttcacgttttgggtattaaacaccacgatcagcggcggtgaggtgtaaaacatttgggcaggtgtgctggacggaagatttttagtaactttaaacagtatttgatgctggccgctgttcagctccagactttccgcgccttttagcaaagaaccggacatgtttttaccgtcaacgaccagcaagtcaatctcaggcgacagttttaacgtcgttgccagcgccgaaccgctagcgcaggcgattaaaactgcgataaccataagaccgattttcatgttccactccttttgcccaatctttgtattgtcagataagcaagataatgcgccaaagattatccctcacatcattataattacatttcgacactttttgtattatttgcttatgtttatatttttgaatttaaaaggaaaaaacaatgtaatttaacagaaaatacattgatcaaggttaaacgaagtcaattgtcggctttcttttcagcctctttggctgatgatatacactgagataatcgacccgatcccgcgctcttttgggacacgaaccggtgaaataagttctatttattatgcacatcagaggaactgaaatatgcatgacaatgatattgctgaggtactcaaaaaaaccaaaactatcgcattagtcggagccagtaataatcctggtcgcccaagctatggcgtgatggcttacctgctttctcagggatatcaggtgattcccgtgagtccgaagctggcggggcaaactttattggggcaaacggcctacggtcaactggcggatatccctcatccggttgatatggtggatgtgtttcgtaacgccgaagcggcttacggcatcgcgcaggaggccatcaccattggcgccaaggtgttgtggttgcagattggtgtgattaatgaacaagcggcggtgctagcggccgatgcgggtcttaaagtggtgatggatcgttgcccgaaaattgagattccgcgcctgggtttggaaaaagcctaaaatcattgcatgcgctatctcaataagctgtcttggcgtcagggcaaggaaatggaaagaaacgataaaaaaacccaacgctgaggttgggttttcatcaggtttaacgtttaggcgataagccttagttccgtaatctcggtgcctgtaactgatcgcgaatagaaaccgccaattcgtctaatgaaggttgatcaggatgagcttcctgtacttcataggccaactgagcctctgccagataagtatgtatcgcctgaccgcgatcgtcctccataacaacgtgataccaaggcgctaatcgcagagtatcgctattaacgacgtcttcaggttgaggttgatccaaggaatattcgggatctatatcgataacaacacccaaataaccgagtagtttatggcgaacttgctggccaataccgaatttgctggcgatcatagtaacctcctgaaaaacatttcgctgccttctgatatgagggcagcgcaggacatttcaagttacatcaccttcacgttacatcactcgacaggcaaaacctttcagatacaaaccttccggataggttgcgataaccggatggtcggccgcctgacggaactgctctacaaattgtatatcacaacctgcatctagcgcggcatcggccagaattttttggaacaaatcatttggcattaatcctgaacaggagaagctcagcaaaatgccgcctggacgcagtaactgtagcgctaacatattgatgtctttataaccacggcaagcgctggccaactgatttttattttcgacaaacttcggcggatccataatgatcatgtcgaatttttccccttgcgtgcggtaattccgcagcagttggaacacatcatcacgaacaaattcggctttgctcagatcaagctggttcaattccacgttttgtttagcgatatccagcgccgcctgtgaggtatccacgctgataacctgctcgcatccgcccataagggctgaaacggcgaacgcgccagtgtatgagaaacagttgagtacgcggcggcctttggcataattgcgagcggccaaacggctatcgcgctgatccagataaaaaccggttttatgaccctgctggatatcgaccagcagtttcatgccgtgttcctgaatcggtagcagtgctggtggaatatcccccaaaataggaccttgggtcagttccataccttcttttttacgaaccgatacgtcggaacgatcgtaaatggaacactccggatagcaatgctgtagcgcgttgatcaaggcaccacgctggtattcagcaccggcagacaacagttgtagaacaaagaagttttggaaacgatcgatggtgacgccaggcaaaccatcagattcaccggcaatcaggcgatagctgtccagaccgtcgcgcttcgcaatccagtcccgccagctttgcgcttgctgtaagcggcggataaagaaatcgttgtcaacggcttcgtcctgttggaaagtccaaacgcgggcacgcagctgtgactctggcgaatacgcgccacgggccagccatttacctcggctgtccataatatcaacggtttccccaggaagcggtttgccttcaacacgttcaacggcgccagaaaatacccaaggatgacggcggagcagggacttttcgcgtcccatagcgagaattacacggttcataataatcttttataatcaattcgttgggattgataacatattatcaatcaaaaattaggccacaatcatatagtaatatgagatgagtcactactttggcggatgggaacgctatgagtgtggatgtattaaattttaatatagaaatattaaaatggtgagatgaaagcgtaatttatcactcaagccggtgtaaaagaaatgtattaacagatttttattccggcttaagccatttatttttatgataaatcaccgcaggattgcctttttgcttctgataacaatcggtggttttatctataggctttgggtattaaggaatatgttcccatttgatatccaccacaacgccgataattttacagtttccgttgataatagtcggcggatgatgcgggtttaatgccttaaggtacttacgtccagcatcggtcataaactgtttgaacgtcgcttcgttttcattttccagcttggccaccaccagttttccgctgaccggctccttctctggatcgactaaaataatcattccttcgggcacggtaaaccccgttggcgcggtcatggagtcacctttcacccgtagccagaaagaaccggggctggcatttaccgtggtgtcaggccaaatatcaatttcatctctgcgatagggttctaccgcttccagccagctcccggcgctcacccagctaatcagcgggaaggtgccaaccgtagatttttgcccaagataactcacgttattcgaattggcattctctccaagcagggcggcctctttggctaacgtaggactgaaatcggcaatagagacctgaagatgtttggcaaatgccgccgcgaccttggtgtttaatggattccggccgttcaggtaatggccaatcgcgccttggctgacgtcaaggtcatcggctatcgcctgttgggtgatatgcagcgattttttctttgcctcataaagagatttcaaacgcatcgcgtcttcgatctgttcgggcgtgagcggttttttcttttccattcactcattctaataccagagctattaaaataacaataccgcagatattgatttgataaatacttgcggtattattaatgggtatttattcatacggagaagacctgtgaagcaaacagcgtctggcgatgatgcaagtgtcgtgtggtttcatagggtcgagcggcgtttaaaatgggtaggcgtgttgttcaaccaggttagcgacgtgataccgacattgctggattccagagtgacggagccaaatagctatggacgatagtctgcgaggcaaggtgattggctgagctaacgcgacaagagcgttgccaacacaagggtttacgaggagtaaggatagggaaccctgaccgctagtaagaactgagaacgttgcggtccggcgtagggatacgtcaaggagcggcatagatttttatttacgtctatctacggatgggcgtgcaggcgaggaaagcaatatgaacctggaatcagcgacaaagtatctattctgtaaatcacaatctttcaccgatagccctggtgcgacgggcgatatattgaccggcgccgatgtgatgggagctttcggcctgtgtcagtccaaggctgaactcgggtttaaagcctattcagggaagctgggtttaagtgctggtgatgccaaagatgcgattcagttactcactcaatatggcatgacccaatgcgataaggtggcagccttacgtaagctggatggcagggttaaagtgaaagtcgtacagaagctggcgggttttgcctatcaggattattgccgcagcgcctcaggcgttgaggaatgttcttgttgtaaggggaaaaggttcgttatcgatagggtagcaacggcgaaagatcgggaaaagagagcctatagccagcctactcaggttatttgcagccagtgttggggaaaaggcgtggtttccgttgcctgccgggattgccgtggccgcggtgtcgttgtggatcaaaaagagaccgagaaacagggccttccagtaaagcgcgattgtcagcgttgccgcggtcgcgggtacgagcgaattccggcatcaaccgcatttcgggcagtgagttcgctgactaacgccatcagtgccgcaacctgggataaaagcattaagccattttacgattcgctgattggccagttggagcaggaagaagtccgcgccagtaacttattgagtaaagcaattaaatagctaatgaaaaaatagtgaattattttatcgttagctatttatttttccgaaaattggggtaaactgcttctcatagtgggctacttataaaggctcatcagagaaaggcctcgggttaaccaccggggctttttgcatttataggtacttagtgaatatcattgtatctcgcagctcatctgttttcctgatgcagactgaggtagatatattaagtaaagcggtgatcaccctgattcaccccaaatatcaaatccagcatctccaacggatgccaggatgagtcaatcaaggcctcgcttctgcggggctttttcgtatctggctctccgtcaaactccaacgtctacacgcccccgtaacgcgaggagccgtggcggagagctattcctgttgacacctgaatcttaaaaatgcccagccagaccggcagggggaggaggctatgcgaatggataaatatgtcagtgagttgtcttgctggcttggtggtttgacggccgcgttgggcgagctttcgttgaacgaatgggcaattatcatcggaattgtctgcaagattggagccgttggcgtgaactggcactacaagcgaaaagaatttcagttaaaggagaaatctaatggctcccgctctacgtaacaaacttctggcgtcctccgctggcggtgcggcgctgactctagctttggtgggcggtcatcacggactggaggggcttgaatatacggcttattttgacgtagttggcgtgctaacgctctgtgatggtgataccggtaagaaaatgagcgctacagcgatggggagtgcgataagcggcgaatgctgcgaataaataggtgtttaattaataccttaggataacaaccgctggaggcgcaggaagccctctgttcagatttgctcatgcaagtcttactcaacggttagggatgagctaaccaaaatcgcagggatgaaaacccttctcaaggaattgagatttcgaactttatcactcatctctgctggcttagaccggtttttttatagctaaaattggagtattaccttggtttcgatttacgaaattgcgcagggatctattgtacttcaacgatggccaaccgttcgataatcccacagggcgttggatagatctgcgcttgactatgccggaattggatctgggaatacgtcaataatattaattgttctgactgtatttggcgtgagacgagcctaaggccataatgagatggttgcggtgagataacagaaaagtagcgataataagtttggtatcggaataaagtttggtatcggaatatatgcactaaaaataaaaatgagggaataaatatgccaaaagtctgtatcgcggcctatgtttacggtgtggttcagggcgtggggttccgtttttgtacccaacatgaagcggttagtcgcggtatcaccggttatgcgaaaaacatggatgacggtagcgttgaagtgattgcctgcggtgagtcagaatcagtggaagagctgatggcgtggctgcggcagggcgggcctcggggggcaagagtggatcgggtgttgacggaacccagagcggttgaagtatttgaaggcttcaagattcgttattaaaccgccggccattaggccggtcagtttatgcagtgagtaacagatctgaacgatcaaatacattttaccggtttaggtaaacctgcaatcttggtggcctgtttcgccgggccttttggaaaaaggcggtagaggtagcggctattgcctttctcctcgccgtatttttgcgccatggctttgaccaacatgcgaattgctggcgaggtattaaactcctgataaaacgctcggacaaagcgaaccacttcccaatgcggctcggttagggtgatgtcttcctgcgcggctaaaataggagccagactttcagaccagtcatcgctattcttcaaatacccctgagcatcggtatcaattatccgaccttcaaactccaacatacggcctcaattatgcaaaaaaccaaatcagcggttaatttagcaaatattcgtcggtatcccaaaaatgtctgcgataaacaggaaagtggcagtggactgcaaagataaaccgcaatgcgccatttttcatcaagctgacgataaattcggctttcgttgccgtggtgacggatttttgtccaattaaaccaaatcaggctttacaagccaggtcgcgctgtttatagtgcgcctcattgcggaggggtggccgagtggctgaaggcaacggtcttgaaaaccgtcgacgggaaaccgttcgagagttcgaatctctcctcctccgccattcacttcttggttatctcttggttttactctttattgacctctctaaaatccaatatttcctgattgaacgttacgatctatttttaccgtaaacgcgtgtttgcatttcatcatttgttgtcgctatgcacaaatattcccttcaaacagaagactgttttatttgcttagcggataatctcgctatcaatacctgcaataaaacattcacaataacattttcacaataaaagaacgctactgcctgtttgaagggaaagcgtcatgcggctgttatatctggataaaatcgactgccccgccgtctaattggtacatggctccgataatcttgatttttccttctttttccagcttattcaaaatatcgctgcgctcacgaatagtttttatcgtgttctctacgttagttttcgctaccgcatccacgaaagcggcgttattgcccgagcggtcgccgctatattctgttgccgcaatggccggttttatttgtgccagtaacccggttaaattccccagctcaacattatcaatggctccgcggatagcaccgcaggcggtatgccccaataccagaatcactttggcaccggctacagcacaggcaaattccaggctaccgaggagatcgttattggcaatgttgccggcgattcgtccattaaatgtttcaccaattccggtatcaaaaacaatttcagccggagcgcgggagtcaatacagcttaatatgaccgccgagggaaattgcccactggcgctggcgcgtttttgcgctaaataatcgtgttgctgcatttttccgtgtcggaaacggatattaccgtctttcaaaccttgaataatctggtctggagtgagtttatctctttcttctttggtcagcgctgcggcataggttactccggggctggttaaaccaatggcaccggtgatgcttagtgctgacatgccaatggccgcttttaataatgaacgtcgtttatttggcgggccgttctcaggatctctggtaggaagtgattccatttttattacctcagggcgaataaaagcagagaaaaaatcagatgtaactgtatgtcacccagaatgggctcctataaatgtagctcattatttgtacggcgctgtcatgtcagtttactggctcatcaattgcacaaattcccgcgcggctttatttagcgactgattctttagccaaacggcgtgaatcggtaatttcagctcgtttttggtatttttaaaatgcagttgtttcaaatgtccttgttttagtaagggttcgatcaatgaaaaaggtagattgccccaacccaaaccggcttctaccatgcccaatgccatagccagcgtgtcggttcgccaatagctgcctgcaaccagcggacgagtatcgctgatagggtggctcatgctggcaacgatgatctggcgaatggtgactaaatcttcaatataaagtgcatcattggcattttctgccgcccagtggcgagctgaaatagtggcaatcaatgattcactgcccacgtattgaaattgttcctgcacgttgatgcttagcccgccgaaggccagcgccacgctgactctgccgcagtgcaacatatgtaacacatcatcctgcggcgcgctgagcacctcgatattcagcagaggataacgttgagacagaattttcaacgccgccagaaccggtgttttatccacttccgccgccatagctaaagcaaacgtgctttccaatccttgagataattcgacggcgtgaacccgtagctgctgaagctgctgagcgattattcgcgcctgtggctccagtgctaatgccaatggcgtcgggattggttcgcgggagcgacggtcgaacagcggaaacccaagctcggcctccatattagcaatgcccatgctgaccgctgacggtacgcggtgtaaggctctggccgccgccgagaaggaccctcggtcgataacggctaaaaataactcgatattttcactggaaaaattcattcgtcctcctatcagtaaaactgataatagctaacttttaatgtcagtacgaatgacgatatcttggcggccttaatcgatgggcgacggagattgctcatcagcgaataataatgaggtggttatgcaagggttaaaaagaaagctggtgtacgtcacggcatatgaaattattgggctggtgatttcggctttggggttggctttgctatcagggacttcgccgggaaatacaggcccgctttcggtgatgattacgactatcgcggtgagttggaactttgtttataactatattttcgagttttgggaaagccgccagctcagccggacgcgcacggttaaacggcgggtgctgcacgccattggctttcaactgacgctggtggtgtatttgattccgttaatcgcctggtggatgaacatcagtttgctggaagctttctatctggatttggcgctcattgtgctaataccttgctataccttcatttttaacgggttgtttgatcggattttcggtttgccaagttctgccatttctattgaaacggccgcggcaaattagccgaatgatataaaaaccaacggagagaaaagggcagggtttgcaaatgaccgctggcgacaacaatcactgccagcggcgttaagatttttatcagatagaattggcggctgagaaaatatcagccgctaaaataacggtcaggctttctcggtgataatttttacgccaactttagtgacgcggtcattatccatttcagcaatagtccaggtcaggccatcccattcgatctggtcaccgataaccggttctccgcccaataaatagatcacaaactgacccaaggtttgctggccatcaattccgtcttccagatttaatccataaatattagagatatcattgagtcgtgcatcagcttccaaaatgaagtcaccgaagaagcgctcatccagagtgatagtaggcgattggctaaataacttacccagcgctggcaaatcgtgttcctgaccgattacacacagaatatcgccttctttcagtcgggtgctaccggttgggtgcagtaagtctttaccgcgaaataacgctgcaattcgagtgccccgcggcattttcagatcgcgcagcgccgcaccaatgcaccatttttccgagctaagctgatagatgaactgttcccattgacggttcatatcaatatctagcccgacgcgggaaatcggtgccagagctgggggaaccaccagtttggttttcctggccgcaaaggacaaactggtgccttgtaatagcaaagaaaccagcaccacaaagaaagcgacgttaaagaataaatgggcgtttggcaggccagccatcattgggaataccgctaaaatcaccggcacagcaccgcgcagacctacccaagagataaaaatacgttcacgtaggttaaagctacggaaaggcagcagcccgataaataccgacagcgggcgagcgaacaaaatcatccacagggataaaatcagcgccggaatggcgatcggcagtaaatcactcggattgagcagtagccccaataccaggaacatcccaatctgactgagccacgctagaccgtcaaaggtttgcaagatcccggaacggttgcggatagggcggttgcccagcatcagcccacacaggtaaacggccagaatgccgctgccatttagcgcagtggttaacgcaaaaatcatgataccgccgctgacggccagtagcggatatagaccgttggctaactcaatgcggttaatcagcagcagcagcagactaccgcccagcaggcccaggataatgcccagcccgaactgttgcagtaaatgtatgatgaacatccagcttaggctggtttcgccggcggaaatcatcgctatcagcgtgatggtcaggaagaccgccataggatcgttgctgccagattcgatctccagcgtagcgctgacgcgttcgtttaacccttttccccctaatagtgagaaaacggccgctgcgtcggtagaacctataattgcgccaattaacatcccctggatgatatccagatcaaatagccaggccgcggccagaccggttaatcccgcggtaatcatcactccaacggtcgctaaagataacgctggccataaagctacgcggaatgatgaagctcgggtgcgcatcccgccgtccagcaaaatcaccgctagcgccaagttactgaccagataggcggccggataattatcaaaaggaataccgccgataccgtcaccgccggccagcatgccgatggcgaggaagataactaaaatcgggatacctaaacgggatgagagtgaactgagtaagatacttgcgcccaccagtactgcgccgattaaaaagagactgttaatagtggtcgcgtccacggtgggggatctcctggtttatgcataaatggcgggttatggatgaaacaagttaattatacacagaaaagcgcagttaaaagctaagatatgacctaattcaaggtgttaaatttgtatttttgaactatctctctggcccaatcgggaaaaaaaagtgttttatcccattgaggaagaattaagcggagctgagcgaggaaatcaggagcagaagcggctcacccgtgccgatggtgcagcgggtgagcacaggcaaagcgttatgcccgatcgagggtgaccagagtgcgtttgactaattcggtcactatggcgcgttcggggttcggcacttctgaaaaggtcagttgtgaaagctcattgaccaacacgctgcgatcttttccgttaatggagccgtccaacgcgctgctgagtcgattgaccaaggcaaaaagggtggaaaactcggcgctgatatcggcatcattcgtcaggtttttcccggtagtgtctggtgtactcatcacaaatcctctgtcatatcactgcgagcgaagcttatcccaatgattgttgctcggtaagaatgcccgattaacgggcatacagtgaggtgttgctgccccatcttgttttgcaaggggtagacagtgtaatggttttaagtggttaacgatattgccacaaccatattacttggtaataacattatgctgtgaggaaacagtgctggctgttttaccggaaaacaagaattttagcagcggaatacgtagatgaatttcgtacagcaaaaaggcgacagggcagacaaacagcaggcccactaggaagcccaaagcgttattctgaatatgcggcgcgataagagcgccgtagatcaaggttaacggatgatgcaccaaataaatgaacaacgacgcgttaaccagataggtaatgccggacgatgaggcgttaagcagacgataacccaaagaaaacaccacgttagtcatggtgatccccatcagcgctttgataaggatatccagctcgaaggaaaaataatccgggttaaacacttgttgattaatacaataggcagccaataggacaacggaagcgattaatgccatcggtgaaaactttagaaacacttcttttagccaaaggtatttaaaagtcatggccccgagaataaagaaaggcgcataaaacagcgtttccataaccacaaaattaaaaacactattaaagagtaattctggggagagtataaatattattctacgaaccacagaatataataaatagaagagaaagaaaaacagtgagattcttcctaaactattcaatttattaatcctaccgttaagtgattggttgatatttttaatcttattgaacaggtaaaggccagctaaggtcagtaatgccaaagttaacaaaaaccagaggtgggaaacgccttcccaaatagcaatatttattttttgataaagtgtaaaagaattccactcctgtaatttatttgtatagtgtttaagcaaaaaaaaattgcggcagggtaatcaatggaatggcggtgattaatggaatagccacgcgttctaggcgaactttcagccagcgccgccgctcatagcgctgatacagcataaaagagaagtaaccggagataacgaagaacacctgcatgcgaaaggcgtggataaagtcattcagcaaggttagagacggcgacgagatactgctgtttactgcccaatggtggctggagtaaatcagcgaaagatgaaaaggaatccccagtaacatcaaataggcgcgaatagcgtccaggaaatattctcgttgtttagtacttttcttcatagatattcgctagttgttataattgagagaataacgcgcttattttatcggcactggataaggcggaatgtaaaaccctactataaggtttattatttttccatagcctattgcaatgaggcttgctaggcttaatgattagttcgtcgtttaaacaatagccataaacatgaaatcaggatttatcatattgtcgccagacaggataatccattaaaatggatttaagaatttaattacccgtaaagggggaattgtgccagttaatattttatcgaaaggccagagtgtgaatcgcgctaaatggctgagtgttgctattttgttatctttattctcttgttcggtttcagcttttactttggatgacgtggcaaaaaaagcccagaatctggcggataaaagttttgatgctcccaagagtaaccttccttcgcaatttcgcgagatgaaattcgccgattatcagcaaattcagttcaatcacgataaatcctattggaataagctgaaaacaccttttaagttagagttttatcatcagggcatgtacttcgatacgccggtgcaaatcaatgagattaccgccaaaagcgtcacaccgattaagtacagtccggattactttaattttggttcggtaaaacacgatcctgactcggtgaaaaacctcggttttgcaggtttcaaagtgctttatccactgaataaagccgataaaaatgacgaagtcatgagtctgttgggtgccagctatttccgggtgattgggaaagggcaggtttatggcctgtctgcacgcgggttggcgattgataccgctttgtcatccggtgaggaattccctcgttttcgcgagttctggattgaacgacctaagcctaacgacaaacatttggtgatttacgcgctgctggattccccgcgcgctaccggtgcttaccgttttaccgtttatccgggccgagataccacaatcgatgtgcaggctaaggtattcctgcgcgacaaagtcgccaaactgggcattgcaccactcaccagcatgttcctgttcgggccgagtcagccttctaaggtattgaattaccgtccggcgctgcatgattccaacggcttatctattcacgcgggcaatggtgaatggatctggcgtccgctgaataatccaaaacatctgtctatcagcacctataccgttgaaaatccgaaggggtttggtttattgcagcgtggccgcgctttctctcaatatgaagatttggacgaccgctacgatctgcgcccaagtgcctgggtagaaccgcggggcgattgggggaaaggcaaagtcgagctggtggaaatcccaactgcggatgaaaccaacgacaatattgtggcgttctggacgccggacgtactgcccgatgctaagcattcgctggatcttaattaccgtctgcactttacccgcgatgaagacaaactgcattctgacaacgtgggttatgtcaaacagaccctacgttctaccggtgatgtgaaacagtcgaatttgattcgcgaaccggacggcagcgtggctttcctggttgattttatcgggccggtattaagctccttagatccgaatatgccgctggcttctcaggtcagcgttggcgataacggtgagctgctggaaaacagcgtacgttataacccggaaaccaaaggctggcgcttgacgctgcgggtcaaagtaaaagatgagaagaaaccgatcgaaatgcgcgcagcgctggtcaacggcgacaaaaccctgacagaaacctggagctatcagctacctgccgatgaataagtcaactcagagtccattacaggattacctcgccgccttgcccctgactgttgagcagcagaaggcattgcgggcggcgttgcctgataacgataaagacgcgctggcccagttgcatcaccaactggcggcgggtcagccggaaccgcacggcgcggcggataacgatgccgcactgtcgtcggttaaggctcgcctgttggctggctggccagatgcattgcagggcggtaaaaaactgtccgtggatgcagaagggcgtactgttattagcgccacgccgccgatcgtgcgctcgcgcatgttcccggaggcctggcgcaccaatccggtggcacgcttttgggattcgttgctcggtcgcaccacggtttcacgttcggctacgccggaacaggcagacgccgagcggaaatggcgcgcggtgggttcaatccgtcgttatatcctgctggcgctgatattggtacaaaccagtattgccaccgtgtatatgaaaagtatcttgccttaccagggctgggcgctgatcgacccgatcgaaatctggaatcaaaactggcaacaatcggtgatgcagctgctgccttacctgttgcaaaccggcattctgattctgtttgccgtcttgttctgctgggtttcggccggtttctggaccgctctgatgggcttcctgcagctgcttattggcaaggataaatacagcatctctgccagcgtagtgggcaatgaaccgctgaatccatcccatcgtacagcgttgatcatgccgatttgtaatgaagacgtagagcgggttttcgcgggtttgcgagcgacttacgaatcggtggcggcgaccgggcaattggaacatttcgatatttacgtattaagtgacagctacgatccggatatctgcgtggccgaacaaaaagcttggctggagctgtgccgggatgtcgatggccacggcaagattttctatcgtcgccgtcgccgtcgggtgaaacggaaaagtggcaatatcgatgatttctgccgtcgctggggtggtcagtatagctatatggtgattctggacgccgatagcgtaatgagcggtgagtgcctgacggggctggttcgtctgatggaagctaaccctaacgccggtattattcagtctgcgccaaaagcctctggcatggatacgctgtatgcgcgggtgcaacaatttgcgactcgggtttatggcccgctgtttaccgccggcctgcattactggcaactgggggaatcgcactattggggccataacgccattatccgtgtgaaaccctttatcgagcattgtgccttggcaccgttgccgggggaaggttcgttcgcaggttccatcttgtcccatgacttcgttgaggccgctttaatgcgtcgggctggttggggcgtgtggatcgcttacgatttgccgggtagctatgaagagttaccgcccaatctgctggacgagctaaagcgcgatcggcgttggtgccacggtaacctgatgaacttccgcctgtttctggtgaaaggtatgcatccggtacaccgggcggtattcctgaccggcgtgatgtcttatctgtctgcgccgctgtggtttatgtttttggttctgtccactgcgttacaggtggtgcataccctaatggagccgcagtatttcttacagccgcgccaactgttccccgtgtggccacaatggcggcctgagctggcgattggcctgttctctaccactttggtattgctgttcctgccgaaattgctgagcatcattctgatttgggccaaaggggcgaaagaatacggtggcaacattcggctgctgttttcgatgctattggaaatgctgttctcggtgctgctggctccggtccgtatgctgttccatacggtatttgtggtcagcgcttttctcggctggtcggttcagtggaattcaccgcagcgggacgatgacgccacgccgtggagcgaagcgctggtgcgtcatgggccgcagctgttgttggggctgatttgggccggtggtgtggcttggctggatcttcgtttcctgtggtggctgtcgccgattgtgttctcgctgattctgtcgccggtggtttctgtgctgtctagccgcagaacgctgggtatggccagtaagcgtgccaaactgttcctgatacccgaggaatataatccgccgcgtgaattggtcgcgaccgaggaatatcttcagcttaaccgccagcgagctttggccgacggcttcctgcacgcggtaatgaatccgtcttataacgcactggcaagcgcaatggctacggcgcgtcatcgggcgaaagagattatcgagcacgggcgagagttacaggtgaatcaggcgttgagtcaggggccagcgaagcttgggaagctgcaacgtttggagctgttgagcgatccggtcatgattgcccgtctgcaccagaagatttggcagcagccagaggcttacgcacagtgggctgatttttatcagcacctgccgcgtaacccgcaggccatgccgagctaatcctgcggaatatctataagttataataacgggcaatgtgttaggcgcattgtccgttttgccttataaatacgcgctgatttttgcgcggatatgccaaccgaaatgtggttaaaatgaacgaccttagacaaccattgactacctgaagagcctgataccgtcgtgaagaaaacattaaatattggactgaagaaaagcctgcgtttgctgctgattctcacgggtattgtgacgctctccggttgcggcagtattatcagccgcacggtgccgggagccgggcacggcaatcaatattatccgggcgtacagtgggacgtcagagattcagcatggaaatatattacggtactcgatgtacctctctccatgattgttgatacctttatgctgcctttcgacgcccagcacggcccttacgagtaacgtcaactctagcttcttgttgggaaaaccagcaagttatagcctttttggtgataggtaaagtttgccaccggcgtcatatgtaacccttttacatgcaccgcgaatgaatgtggattggcatcgtctacaaaagccgctccgacgtcataattagcctgagtgtgttgctttacctcggctaatagttggctaacgatgccctgaccgcgtttattctgagcgacgcacaccggcccatagagaaacactcgcagctcggttagcggtttaccctcaaaacgttgctgcctcagggcttccagcatggcgtcgaccaccggcggtcgcggtcgggcatcggttttcatcatgcagacaaaaccagctacttcgccattatcatcttctgctaccaatatgcccaaatcattatttatcgcggctaactgtttctcatccatgcgggaaacgataaatccctgctttttttgctcgtcactcaagttttcagggatgttttcctgctgtaattgcaggattgccgaatagtcattaaggtgagccagtctgatcttcatcattaaccacgctttttaagttatttgagttaactatgctgtttgggggcgggagaaaatcatgttaccaagtgatgcggtcatgcgcgtagccagaccgacagataatcttgatattatcactgaaatgtatcgtttggggttgaacgtgctgggcagttttgcagaccatcagggttttgatggtgtgattttgggtcatccgcatcacggctatcatctggagtttacccatcatcgcagcacttccgttgggcgtgcgccaacggcagacaatctgctagtcttttatcttccggatccgaacatatgggcgacacaatgtcagcaaatgctcaaagccggttttcaggtggtggagtcctacaacccctattgggacgaaagtgggcaaacttttgaagacattgatggctatcgcgtcgtgttgcaacaacgggcgtggccgctgtaaacggtggtgcaggtgagcgggcagtaaaaagccagccgaaaataaggctggctttttatcaagtctattccgacaaattacgcagttttttcagcgccttgggtgttattcatcatgcgacgaatcggcacaatcagcagaatcaggatggcggcgcagatgaccagtgcgatggagcaacgggcaaacagcgttggcagcatatccaactgatcggcttttacgtgtccaccaatcaggcctgcggccagattacccagcgcggaagcgcagaaccacagacccataacctgaccacgcattctgtccggtgctagcaatgtcatcgtcgccagcccgatagggctaaggcagagctcacctagcgtcaacatcagaatactgcctaccagccagaatggagaaaccccttcaccggtggccagcacatgctgcgctgccagcatcatcacaccaaaaccggcggcggcgcacaaaataccgatgacaaatttggtaatgctgcttgggcgaatgcttttcttcgccagtgcgggccatgcccagctgaagattggcgctaacagaataataaataaggcgttaattgactggaaccatacggttgggatttcaaagcccatgaccatacgatcggtgtaatcattggcgaacaggttgaaagacgtcggtttttgctcgaaggctgaccagaagaaagcggcggagaccagcaggataaagcacaccagcagccgagctttgtctttgcggcttaaaccggcaaaagcgaaaagatagacgaaatacagcgttaccgacgcggcaatcaggtacaccagactgctggcgaccagtaccggattgatttcaatcacgccttgagccaccagtgtgactaccgccgccaatgccaccatcgccgcgcagacccatttaccgacgtttttacgttgaacggtcgggctgttccaactggagtccatgccaacttcggcatcgtagcgagtcattgatggaatcacgaacatgcggaaggtcaataatgccaccagcataccgacgccgccgataccgaagccccagtgccagccgtgggtgcgtaatagccagccagagagcagcggggcaataaaggaacccatgttgattcccatataaaacagtgagaaaccgccgtcgcggcgcgcatcaccgggcttatataaggttccgaccatcacggaaatacaggttttgaacaggcctgttcctaatacgataaagaccagcccaataaagaacatgtcattaccgaaaaatgcggataaagcgatggaaaggtggcccatggcaatcaggatagagccgtaccaaacggcgcgctgttggcctagccagttatcggctagccagccgccgggcaatgaagctaaatacaggctaccggcaaaaataccgacgatagcggaagcattttctcgcggtaaacctaacccaccgtcataaaccgtagcggccataaacagaatcagcagcggacggatgccataaaacgagaagcgctcccacatctcggtaaagaatagcgaactcagaggataaggatggccgaagaaagtccggctattgttggtattagaggattgcataaagtcttcccatagaaatcgcctgttaaggtcgggctgttgtgctgtggtatgagtgattcaatacgccttattctcctgttaatgccgtccgttatcgttaggttatcgggcagtcactaatttcatgaataatcgatttaacactctctataataggatttaactccataataacgtcattttggttttctaccgtgcttatatcccattatttagacgaaaagtcgatatacatctcgttttttagatttatatctgtgggtggatgtggatttttatgacgaaattatagtgcaaatttcgaggctgataatgagatttatctatttattttcaactagttagtcttttttctttagagtgagcttacccctttttttgaacgggtaaattattttttactggaaagagaggaaaatgacagttttggggagaataaggatgatagccactttttaagtgggtataagtgacatttataagagaaaagtcagcgataaactgtgattttaatcacagcaaaattttggcatggaggagggaagatttgcgcttatccggggggagttttagctatcttcctgacgattggccgattgtttcaaagcctgagccggtcgccgtcgcaggcaccagtatgagtagaatgcgttagataacaccaccacggcggtggcgcagaataccgcccggaagccataactggcggaaacggcggcgcccagcagcgggccgctgacgttgccaacgtcccgaaatgattggttgtagctgaaaattcgaccagccacctgatttgtacaattataaatcaataatgtttgcactgcgggcagtagcgcgccgtcggtagcaccgagcaaaaagcgtaatactgccaattgccacggcgtctgtaccagcgccattgggatcaacaacaacaccgacagcgccagcatagcgataagaatacgttcggggccgattttatcgcctaattttcccagtctgggggcactgattaacgccgcaacgccaggcaccgaggcaatcattccgctaacaaatgccagattgtgaatatctcccgccagctcgcgtacgtacagcgtcaaaatcggtgcgattgaaccggttgccacctgaataatcatggtagtaacaaacaggctaagcaccagtttaggatttttcagcgattgtaaaacctgccgtccgttgagcatgtcttttttcaacaccggcgtaaattgctctttaacgcacagtagcgtcataacaaagcacaggaacagtacggcggcggtaataaagaataccggacgtaggccgtagctatctgccagtaaaccaccgatcagcgggccaattaacgcgccgctgacgccgccggtagacaacgtgcccagcgcccagccgcttttatgtcgtggcacctgagtggcaatcagcgcattggcgttgggaataaagccaccgagcagacccagcagggcgcgtaacgccagaaattgccagatattctgcgccattcccattaacaccatcacgatccccatgcctaatgccgatcgtaatagcataatttttctgcctttacggtcggccaaactgccccaaaacggcgacgcaatggctgaaaacaggaaggtaatactgaacaccagccctgaccacatattcagcgcctgatgaccagtcacgccgaggatttccacgtataaaggcagaaaaggcataatcagactgaaggcggcaccggtcagaaaacagcccaaccaagcgacaaataggttccgtttccagtgaataggttctggtgacgaggtcataaattaccgatagaagaatgtgttagctctgcggcacggtttagcgtcatggtgaggggcgttaatatggcaaagcacaaaagcagatgattagcctgttaagtatgcgcctgttgaatagatacatcaaccatttggttaacggtttttataaaaatgaaaagcaggtttattatctaggaataagcatataaattttttgaataagacgatgaggaagatgaatgagtacggcggaaagcgggaaggttaacagctgttagcaaagtacagcgatgtctgaaagcgtgaggggctgagcagggtcagagaaaacaaaagcgataaaatagccgcggggtcttgttcaccccgcgggaatagcgatcaaatctactagatttcccgacgtttacccgaattaacggtaggcttcgtttttggtgatcgagtaacggccgctgcccaacagcataatgatgataccgccgaagaaatacagcgcttcgttttccagcccccaggcacccacgtcggtcagagtaaagaacttaccggtgccaaccatcagagtggccaccagcaggttaacggcataaataaaggccgccggacgggtaaatagccccagaatcatcagaataggcacaatgatctcaccaatataaacgccgtaggcaacaaagccagggatgccctgagcctgtagcatatcggaaatccaactggtgccatgttggatttttgctaccccgtggaatagcatcaaaataccaaaagtcaggcgtaacagtagcttaccgccgtcttgatgatcggttaatcgtgtgaaccactgatttgcactcgccagcatggtgtatatccttatagaaattgaagaaataacctgataataactcttattaattacacacaattatgtgtagttaataatcattctcatagtggataaaactgacagaatagttcaaaaatattgaatctgcctgattcatttcttatttcttttcgtttcctaccttaatttctgactttcattccctgttttggcaaattgatgtcttacaaacctttcagagcagttagcgagtctgacgtcatggttggagtaaattcgatgacttcatatcgggcaacagcgttgaaagaatcttcagccagaatggcatccagttcgtcgcggggtaaggcgatggcaaagataatgccgccagtgcgcgggtttttacgcccggaagcgatgaaaatgccctgatcgtagtatttgcgtaaccaggcaatatgggcatcgagatgagtatcgacttcttcaacgggacgatgataagtgagattaatgatgtacatagctaagccatatggaaataagagaaagataaattcccatgttgattacaaattaacaaggcttggctcggtatttttgtcgttaaaaaagggctagcgttgaataaccagagggatgcagcgttgatttacgccggtgcagagaaagccccggcgtgatattgcgaaaggcgtcagagcgctaatcgtacagcgagggggcgccttccggacgggttttgaagcggcggtgcagccacatatattgatccgttgccaactgaatttcttcttcgatcactttattcataaaggctgcggcagtgacttcgctttccagcgggaagtcttctaccgccggttgcagaatcagttcgtaacctttgccatcgggcagacggcgcggggtgaagggaatcaccgccggtttcgccgtgcgtaccaataaataagtgccggtggtggtggccgcatcgtcaacggcaaacagcggaacaaacacgctgctgcgtgggccatagtcatgatccggcgcataccagatgatttcgccttgtctcaggctacgaatcatccctttcaaatctttgcgatccagcatggatttattggagcgcattcggccccaagtctgcatccaatccattgccttattatcgtgggggcgataaaccccgattcctgggttatgaatgccgaaaatgcgggcacccagctccagcgttagaaaatgtagaccgatcaacagtacgccctgaccattctcccgagctttctcaatatgttctagtccgctgactttacaccaacgattgatgcgccagtctggccaaaaccaagccataccggtttcaaacagtcccataccgacagattcgaagtttttgaccaccagctgctcgcgttccgctttggacatttgcggaaagcacagttccagattacgttctgcgatataaaggcggcgtttgaggaaacgcattgagaaacggccgagggaagtacccagtgtataaatcaccggataaggcagtaaaaccagcaagtaaaggatacccaggcctaaccatgtcagccagtatcttgggtgcagtaacgagcgattaaaagaaggaacttgcatcatgtgttctcagcttcagagtagtaatttaggacagttaacttttacgttatggcggctaatctggggccgctaatcatgctttcaatatgtttatctgtcatttaaggtagttctattgtggcacttttagggaaaaacgcgaaaacagaccgcattaaaaaactattcttagtaacatttgctttatttttgagcaaaataaaccggttttagttgataaaataaacacgcctagcttatgccgctacgcttattcagcaaactgactaattctgccaaactcgcagcagccattttttccatgactttagctctgtgaacctcaacggttcttacagaaacacaggctttattggcaatgtcgcggttgatcaatccttgcgctacccattgtgcaatccgctgctcttttggcgtcaggctggcgtagcgcaaattgacctgatggcgtgaaaccgcctgttcggaatgtttcaatgcctgctggagtgcattaaccaaaggctgagtggcgacgggtttttgcaggaaatcgatagcaccttgcttcatttgttcaaccgccagcggaacatccccatgtccggtaagaaaaactaccgccagcgtgctgcctgcttcacgtaaacgccgatggatttgtaggccgtccagcactggcatacgaatatccagcagtactaccgcggtttgaaacaaatcggcttcgtttaggaaactctggccctgatgccagatacagactttatagcccagactttccaataaaaaacgacaggcatcggtcacggccaaatcgtcgtccactaaatgtatgactgacactaacttgttccttttagtgaggaatttagagggaagaataatcggacctctaacccagctgcgccgttagcggcaagggcgttggttaacgtcattttcccaccctggctgcccatcagccgttggcaaatcaccaaacctaaccccaggccatctggttttcccgatttgaatggcataaatagctgattgagctgcgaaaccgttaatccgccaccatcgtcctgcaaactgagttctgttccttcgggcgtttgattgccgttcagacatagtctccgcgcgccggcctgtaggctgttggtgaacaggttgcaaaatatctggtcgagcaaggttgcagggagcatcagctgtatttcagccggaaggtcaatattcagcctgctatcaggataatgatgtggcgcgccgataagttgccaaacgtgctctgccacgttcctaggtgactgcggaatacgcgtggacgtggctggcgctttgtccacccaaagacgtaggttggcgataatatccgcccctcgctgcgcctgggcgctgatttgctgtaacaccggtagcagcggatgatctggctgttcacgttttaaacggatatcgcagccttcggcgtagtggcgaaccgccgaaagtggctggttgagttcatgagcaaagccggacgccatttcccccaaaatactgaggcgttgagcttgctccagtgcggtttcccgctctcgtagctgctggtgggccagctctaactgctggctgcgacggcgcactaaaaaggccacccaaatatgattcgcacccagcagcagcaatattgccgcgataatcccgagcaatagccggttttgtagtgcccaggaaagtatcgcctgccatagctgcggctgttctggatgctgatttatcgagcgcaacaaggcttcgacctggctggtggaggaaggcgcgccccattgcggctccttgctgaccgttggcgtgagcagcatccgcgttacttggtcagccagcgaatccggtacctgcgccaacgcggcaaatgaccagttggggtataaatcactgctggtcagacagggcactgtggtgggtttagccagtaatgctctgaaatcagaggcctgcaataatccttcgttttgtaaatcttccagcaagcaggtggggactatcgcggcatccagagcgccatctcgcagcaaatacatcaatgtatccaccgggaagccggaaaagtgcagattaaaatcctgcccaggccgtaagccagcgtcccgcaaggctttgtaacctaaaagataaccgccgaatgcatccgctgataccgcgccaacctgtttgccgcgtaactcatccgcttgagtgataggactgtcctgacggactaaaatcacgctgccaatcacgttgcggctggcgttgttcggctcatggctggatcgcagtgaaaccagccagcgtagcggatagtggctatctatttgcacgtactgcgctggattggtgagcagaaaatccacgcgcccatgttgcacggcggttttcatcgccgtgagatccaatggcaacaagcgaaaatgctgatcgggcaagccttgattgaggctatcagccagcggctgccagcgttgcagcgtttgggcattgccgcgtaatgccagtacgccaatcgtccattctttgctgtatgccgtcagcgaaacaccgtaacacagcaagataatcaacaggtttcgcaacgtgtcttctcctttttatgacccagatcgccccggtgaattgtcctggatcaagtccctaaagggaatgtggaaaaccacaatagggcttctgtttggcaatttctacactcctcaccatcaactcgtcacatcttcctatcaattaaccgacggcgggtttggagaacaccatggatcgagggaaaagagagtttctacagcgattgggcgtgctaaccgccggcgcagctttggttccgctggctgaagccggttggaaactggaaccgagccgtcgcaacggcaacccccagcgtcgctatgccatgctgatcgatctgcgtcgctgtatcggctgtcaggcctgtaccgtcagttgtgccattgaaaatcagtcaccgcaaggccagtttcgcaccagcgttaaccagtatcagatcgcgctagaaggcgagggcagcgtaaccaacgtgctgctgcctcgattatgcaatcactgtgataacccgccctgcgtaccggtgtgtccggtacaggcaacctatcagcggcaggatggcattgtggtcatcgataacacgcgctgcgtaggctgcgcctactgtgtgcaggcctgtccttatgaggcgcggtttatcaatcacaccactcaaacggcggataaatgcactttctgcgtacaccgtctggaggccggtttattgccagcctgcgtggaatcctgtgtcggcggggcgcgtattatcggcgacttgcacgatgaaaacagtgaactgcgccggatgctcaaacagtatgagggcgaaattaaggtgctgaaaccggagcaaggtacgcagccacaggtgttttacctcggtttaaatgaagtgtttactcggccgctacaggggcaaccggcgctgtggcaggaggttcacccatgattcgtgaaattctggtgcgtccgcaggaaatcagttggttaccttgggcagtgcaatattttttctttatcgggctggcctgtggtgcagtgttactcggctgttggcaacgctggttcaggcgagataaagggccacagctagaacgagcggcgctgatgttggctaccgcggcggctattgtggcaccgttggctttgagcgcggatttacatcagccagcgcgcgcctggcatttttacccttattttacgccctggtcgtggatgtcatggggttcgctgttcttgccgctgtttagcgggctggtggtgacctattttctggtcttaatctacggccaacgggtaaaccggcctttgactggattactgcggctgttatcgattctgacggcgttatcggcactttcgattctgatgtataccgggcgggaagtgtcggtgctacgcgctcagccgctgtggttcaccctgtggctgccgctgtttattttcctgacggcgatgcaggcggtgccttcgttgctggctttgtggctgtggcgtcagccgcaggttcagaggtatctggcgcgttggcaactggtttctctactgcttttggccttggtgacgttgctatgggccggcggcgcgacgctttctgctgcggcgttacgtctgtgggccagcgggcacccgttaaccgcggctgcgccattattgattggattgatgttattgggaatggcattgctgaatctgaaacgttgcttacctatcggtgtggttatcctgcaaagcctgctggcgatggtgatgtgctggatggtgcgttggctattgctgatgcaaagccaaaccttgcctaaatataacgtgctcgcgaacccttatcagttatcgccgggtaccgacggattgctggcgatcatcggtacgttcggtttatgggtgacattaattattgcgctccgtgaaggagtcagatggtgggaagggagagtgcaacatggctaaaacgacgcggcggcaatggttaaaaggcggtttggctctggggggattagtggcctttggcgcaggttatcacgatgtggtgcgtaaaacgctaattgggctgcgggacggcagcgccggaaagttgacgcgagaccccattaacggcaactcactcacgccggaaggccatgccgggcaagaatggcaggctacgccgcatcaggcggtttcgatgacacaatgttttggctgctggacgctgtgtgggctacgagtgcgagtggatacgccgcaaaatcgcattttgcgaatcgcaggcaacccctatcacccgttgtctcacgaccaccattttccctacggattaccggtgagcgaagctttgcgccgcatgggcggtgagcaagggttggcggacagatctaccgcatgtgctcgaggcgcgacgctactggaaggcgtgaccagcccttatcgcgttcttgagccgatgaaacgagtgggggcgcgtggtgaaggtcagtggcaacgtatcagtttcgaacagttagtgaaagaagtgacggaaggcggcgatctgtttggggaaggccatgtcgacggcctgcgggcgattcgcgatctggatacgccaatcgatccggctcagccgtccttggggccgaaggccaaccagttgctgatgaccaacgccggtgacgacgggcgggacgcgtttatccaacgctttgctgccaaagcctttggtactaaaaatcttggtagccacggcgcttactgcgggctggcttatcgcgccggttctggggcattaatgggggatttggataaaaatgcacacgtaaaaccggattgggataatgtgcgttttgctctgtttttaggaacctctccggcgcaatcgggcaacccgtttaaacggcaaggcagacaattagccaatgcgcgccaacgggacgattttaattacgtggtggtggctcccgcgttgccgctgacgaccacgctggcaaatcagcataaccgttgggtgcccgtgctgccgggcagtgattcggcgctggtgatgggaatgattcgctggattctcgaacaggaacgttttaacgcgccatatctgaaagtaccgggagaggcggctatgactgccgccggagagcgcagttggactaacgctacccatttggtgattgttagcccgcaacaccctctggccggtcagtttctgcgggcggcgcatttgagcggtgaaatccttgcggaaggggaagaaagcccggtactggtggcgcagggcgatggggctttggtggcggcaccggttgcgatggacgcggagctatatgtcagtcagagcgttacgttggcggacgggcagcaggttgacgtgcaatcggggctgagcctgctgcgtgcggcggctaatcgttttacgctggaggaatacagccagcagtgcggtgttccggtggcgaccatcagcgggttggcgaaagaattcaccgcctatcagcgtcaggcggcggtgatttcccacggtggaatgatgagcggcaacggtttttataccacttgggcggttatgatgctgaacgcgctgattggtaacctgaatctgaaaggcggtgtttccgtcggcggaggcaaatttgacggctttgctgatggcccgcgctaccaactggccagtttccccgggcaggttaaatctcgcggtttgtcactatcccgcagtaaacagccttacgaaaaatctgaggaatatcaacaaaaactggctgccggtgaaccgccgtatcctgcaaaagggccgtggtacccctttgtcggcgggcagttaaccgagcaattggctccggcgctttctggctatccttacccgctaaaagcctggatcagccatatgaccaatccgttgtacggtgtcgctggtttacgtggtctggttgaagataagttgaaagatcctaaacatttacccctgtttattgccatcgatgcttttatcaatgaaaccactgcgctggctgattatatcgtgccagatacacataatttcgaaagctgggggtttagcgcgccttgggctggcgtattggttaaagccagcactgcccgctggccggtggtggagtcacgcacggcgcgcactgccgacggacaagcggtggcgatggagagtttcctgatcgccgttgcgaaagcgctggctttacccggttttggtgaaaatgcgatgcaggacgtacagggcaaggggttaccgctcgatcgtgccgaagatttttatctgcgcgccgcagccaatatcgcctatctgggtgaaaaccccgtgcccgcagcgcaactggacgaattacaactcaccggcgtggtacgtttactgccggaaattcagcgcagtttgtatccggatgagcaaatgcgggttgcgtatttactggcgcgaggcgggcgttttgcgccgtatgaaaaatcgtggaacggcgacgctactgggccgcagtggaagaaaccgctacatatctggaatgaaaatgtggctaaacatcgtcatgccatgaccggagagcgttattcgggttgcccgactttctatccgccgcggctggccgatggctccagtattcaccagcattatcccgtgcagagttggccattccagttgatgtcgtttaaatcacatttgatgagcagctctacgccgatgattgagcgtctgcgggcagtcaaagccagtaatctggtggcgattaatccgcaggatgccaaagcgctgggcgtggcgcacggcgattgggtcaaactggaaacccccggcggcagcatgaaagcgcagctcagtgtattagatggagtgatgccaggagttattgcaattgagcacggttatggtcatcgcgaaatgggtgcgaatctgcatcagcttgacggcgtggaaatggcgagtgacagccgaatcggcgcaggcgttaatcttaatgacctcggatttatcgatcctacccgagaagtgccaaatacctggctggattgggtgagcggcgcggcggtgcggcaagggcttccggctaaactgacgcgcttagcctgatatcagtttgttgctttgcgtgcggaaccccttccggaaagaaggggtttttctttttatagcgtattatatatgcagctaattaatcgccataaatgggatagacaacggatgatgcgagcagaaaaagtcagcgtcgggttattgttcggtggcgtcctgctcggttatgcaggtgcacactggcaacacaattttttactggtattggccggagcctcattgctggctggcattatagcctctggtttcaccgattgtcgtcgctgcaaaaagccttaactccgtgccgtagacgacgatcggcgctgtccgataaaaggcgctacgctgtggatgatcatcccgataatgaccagcccaattcccgccagtgataaactggtgggtaatggagccgccagccagaccatttccccaagcaaagcgaagagcacttctccagattgagtggcttccaccgctgctaaacgggaataatcctgtttgaccagattggttgcggcaaagaacagcaaagtggcaatcacgccggagaacaacgccaccagcagggattgctcgacctgcccctgagagggccagccgacctgatacaccccaacggcagacagcagaatccagaatggtagactggccagcgtcatatttagcacccgctggagggtatttacctcaccctgacaaatagccatcatcttgcgattgcctaacggatacataaaagcagccaatgttaccggcaacaaacaccacagcgtttgttgcaagttcaacgattgagcgtgctgccactgcattaacccaacgccgatcaaaatcaacagcgaccagcgcaatcctttgaaggggattttaccgcgacgcgtctgtaacccctgttccgtggcgatttgctgtttaaacagcgggatcagcagtgagcctgcaataatggtaatttgccaggaaccggccaccagccagccttcgccataagatcccgccagactcagcggcgcgtaaaacaggccaaacccaacggtgctccacagcagatagcctgaccagtattggcgcaaatggctcagactttgccgcagttgcccacgcatcattaccagcaaccacagcatgggagccataaaaataaaccgcagcgcggcactccagatccagctgccgccggataaatccatggctcgattaagaataaaagtaaaagcgaaaaagaatgacgcggcgaggccataaaatatagcgcgcatgattttcctttttaaagcagtcgccaaaatccctgagtaaaatctgataatgaacagaatagagtcgcgggagtcgatagccatcaggcggaaagcggaacaataaaacaggaatacagatctacgtcgctaacgtcaagtctctgccaattaaccggcccctaaagatgtgaccgcgctcagtttcgggtatgatgtgcgccgcgcgggtaaatgctcgccgcaaccgcagtttcgctgcataaaaatctctcagaaacctcttcgaaagacaggaaagtacaccatgccagtgttacataaccgaatttctaatgaggaacttaaagcacggatgttggccgaaaccgaaccccgtaccacagtttctttttataaatacttcaatctggatgacgccaaagcattccgtgacagcctttacagccaatttgtgaaattgggcgtatttggccgggtttacgtggcgaaagaaggtatcaatgcgcaaatcagcgttcccgccaaccgttatgatgagtttaaagcggttttattcgcttctcatccggcgttggatcaggttcgcctgaacgtagctctggaagacgacggaaaatccttctgggtgctgcgaatgaaagtgcgtgagcgcattgttgccgacggtattgatgacgacagctttaatccggcaaacgtcggccagtatctgaaggccgatcaggttaatcagatgattgacgatccggatacattgttcgttgatatgcgtaaccactatgaatatgaagtggggcattttgaaaacgcgattgaagttccgtccgatactttccgggaacagctgccgatggcagtagaaatgctacagcaagacaaagacaaaaatatcgtcatgtattgcaccggcggtattcgctgtgaaaaagccagcgcctacatgttgcataacggcttcaaaaatatttatcacgttgaaggaggcatcattgagtacgcccgcaaagccaaggaacagggtttaccgctgaaattcgtcggtaaaaactttgtctttgacgagcgcatgggcgagcggatttcggacgatgtgattgcgaactgtcatcagtgcggcacgccttgcgatgctcataccaactgtaaaaatgacggttgccatctgctgtttattcaatgtccaagctgcgctgccaaatttgacggctgctgtagccagatttgtcaggacgaattgaaacttccccgtgaagagcagcgcgcccgtcgtgctggccgcgaaaacggtgtgaagattttcaataaatcaaaaggattactgcaaaccactatgcatattcctgcgcctgaaaaatctgacgactaaagctaagcttaaagggttagtttctgcctcaaccctctggctatattcggaaaattaagtttaagttgagggatcgctctgttattttcgatctctcactatttctatcatcgttctcgatgacgacctcgatgcaaggacagattatggtaacgtcggcagtcagcaataaaggtttacgtattgtcgccatgttggccatgctggtagtgattatggccggaatcaaggcggcgtcgcccatcgtggtacctttccttttggcggtatttctctccattgtattgaatccattggtgagtttgctgcaaaaaatcaaaatcccccgcacactggcaattgtactgttggtggtggttattattttgctgatgtcattcctgttaggaatgctcggtaattctttaaatgagtttgcccgctcattaccgcaatatcgcggcatgatgctggaaaaaattcgcgatctacacggttttgccgtgcgtttcaatattgatatgtccgtggatgacgtaatgaagttcgtcgatcctggcgcggccatgaatttcgtcactcgctcgattagccatctttccggcgcgatgaccggtattttcctgctgttgatgacggtggtgtttatgctgtttgaagttgagcgcctgccgtacaaattgcaattaatgttcgacgatccggtaaaaggcattgctatcttgcagcgtgcggtaaagggcgtcactcactatctggtgattaaaacgattatcagccttgctacggggctggtggtttggatattcctggcatcaatgaatgttcgctttgcttttatctggggtttgctggcattcgtactcaattacatacccaatatcggctcggtgctggctgctatcccaccgattattcaggctttattgtttaatggctttgccgacgcgctggcggttactggcggctttattctgataaacctgattggtggcaacatcatcgatccgcgcatgatgggccgtggactaggactttctacgctggtggtgtttctgtcattgatattttggggatggttactcgggccgatagggatgctgctgtcggtgccgttgacgatcatcgctaaaattgcgttggagctgacgccaaccggccataaatttgccgtattgctgggggatggtaaaccggcaacagatgaaaaagagtcgtagagttaggccatagcagtgcgatgcggcatcaatgtatgcctcatcgcgcattttcagcaacaaatacgcaaagataatgattcggaaagcgggatagaccgtcgttgggaacgacgttaagcgtagaaaaagaagtagatatccagcgccaataaaattagccataggcaaatgtagaacactaaatgtgcgcgtacgttgttgatcaacatcgaaaataatttattgaacatggatgccaacgggctgctgagctttgtgattattatagttatatttattattaaaacaataagttactactaagccctcaacggatattgtccaatagagtttctcttttacggtatttatcattaaaaataaagggtattactttctaaaaataaggaaggtagcaggtaaatccgaaactctgactcaataacgataacaattagtgttagggggaaagctgacatgcaatataagaatagttaattaattaaagttatcttcagtgagatccccattgtagattccggctatatattctccatgatatcgagcgtggttaatattagccggatttttaattttactagtaagatattgctgccattaattttatccttaaagatacggttaaccagtatcttcggaggcattattgatggaaataaagcttaccaagaaatgtgtagctaaagaggcgctgaccgatggagaaaacagtgagccatcttcaatacaaatatttaaaaacgttatagataaagcatagctccagacgattcctaacttttattttttcggtgatatgtcttttatgcgaatatacggtgctatcactgatatttagcttttttgctatgcgataatttggcatttctgtcatccagtaacacatcactttatgttcttgcggactaaataaggacgaatgcgttgtcccttgctgccagccttcctgactaccagcatcctgcaagtgtgtcagtgagtgcaataaatcgggtaagcgccgcttggctaatattgatacagtctccgttaaaggtattggtgtttcgctaaagggataagatgcatccagataaatatagactctggcgcgtgtacagcgggtaataaattcctccagcaatggacaatgtccgccgtagcgacaatattgggttaaattgaccattattaccgcaggatcgaaactctgaattaccagcgttgcttgctcaacagttgctacatccattaaatttacagatgacatgctatttaagtatttatttacaccagagcgagtgtaataacattcgtcgatgattaatattctcatggtgttacatccttgtcatacgggcaaccatacccggccgcaaacgcgaataagttaatcctcaggtagctttagcgtcaattcgggattcgcgatgctaatagacggcatttacgaatggataattataaataagcaggaaatagcagaaatagcagtgggataatcgaagatgaacagaataataaaaaaatgcaggagattctaaaactatcagaatatcctgcgataaatagcccgattacgctaagacgatcagttaaatcgactcaaagaaaaaggtttaatatcaataggagacgccttatcttgcgcaaacagcgcggcgatttcgcccagagcagtcgcgaacttaaaaccgtggccacttagcccgctaaataccataattctttgactttctggcagcgtatcgataataaaatcttcatcaggactcatatcgtaagtgcaggatgaaccccttaaacacacgccaacgccgggcaaatagttgcgtaaaaagctgaaaacttcggttccatcctcggcaaaaccgccaaaaggcttgcgttgatccgcagattcaatgagttgaccgccgttatgtttaccgattttcagttcttccttcttcgacgggaaaccatagtaatggacgttatctggagtttctacggtgaaggcggggaagtgattttcttcgctgtaacgtccgtctgcgtgatgccaggcaaagactttacgcacggcggaaatggggagcgtaggaagtaattttttcacccaggtgccagcggtgaccaccactttcttaccgcggtaggtaccatcgatagtcaccacatccacgccattatcgtcagggtgaatagccgaaaccggacagttgaatagaatcccgcagccagcggcggtgacttctttaatcagggtggagacggccaaatcagattgcagatagcctgatttcggctcaaatacgccgatatagtcgtcaggaacggtgaaaagcggccatttttgcctcacttcgctcccgttcatgacctgaatcggcaaatcgtacttgcgggcactttcctgtacgtttttcaggaattcggagtcttgcgggcccaggttaatcacgccgctggcatgaaacagctccgcgccagtcgctgtggacaggccatcccacaaggtttgcgcacgaagaatcagtggcacatatttttccccttcgccataagcatgacgaatcaggcgagtgtcgccgtggtgactgccggattgatgtggcggcataccgctgtcgatcatcagaacctttaatccagcctgcgccgcgtaataacccgcagctgagccaacggaaccgctgccaaccacaatcaaatcatattccatgctctgggactccaggaaatagcgtatatgcctgataaaccttcaggccatcgtataaaggcaggctacgcaaaagtaataattatgtgtattagtaataacatgagtagaagactatctaaaggggcgaaacgagcgtgagggcgggagtggcgaataaaaaggcacctgatgaagactcatcggtgccctggggtttagctttgaaataactagtgttttcggtggtcaatgtctacataatccgttgattcgatcttagcaatgcctgcttctagaatattaattaattggcgtgctacatcggtggtcagccagagcgttctatcgactaaggcgttctctgtgggttgatccacggaagacaggtaatgaagacgaatcatcatggcattgtacgcgtctacagtgctgatatcccagcctacgagcgggtgagtctgaataacttcatcatttctgtccatatagaccccttattaagtagtaactaattgaagtaactaatgaggatcattcggctcataattgagtgagctttttcagtatacgcaactagatatttatttggcgaataacacaacatctttacaaatttgtttaataacgctgagaaaatgcacaataacgcgattcagcttcaatatgggcatagaaagaaagaggacaaggggctgagaaaaaataatcagagaacatgatgtgaggacaaaaaagccgaggagcgactccccggcaaaaactgcataacagtgagttattctgcgtcaaaccaatcgtcggcgctttcccaaatttcttgcaatatttcagagatccgatctttatcggttttggctccgccaagtaccgaaagatcgttagctccggcataacgaatcctgacggtcgtatccgggaattgagcattgagccttttagtgagctccccggttaaggcttcaatcgcgcccgcgggtaatgggttttttctatcaatgctgacttcaacacgcatgtttcatcctccgaatattgatactgtatgtttatacagttaaatgtaatgtgcgacaagagggagaatgaaaaaaatgagaaaaataagggaagagaataacgcttccccttgaaagacattagctttttactgaccaattcagcgtttggcctgccagataaggcacaatagattcgttaccaagcgaaatttcttccggctgggtgaagggctggcgcaccaactcaacaaaatcttcattgactggcaaaccgtagaaacgcggcccgttcaatgaacagaaggcttcaagatgttgtaaagcctccatttcttcaaacacggtagcgtaggacggtaaggccgacggcgcattgaatacgcccgcgcagccacaggaagactctttgcggtgtttggcatgcggcgctgagtcggtacccaggaagaaacgctcgctgccgctggcaacggcttgacgcagagcctgctggtgggtgccacgtttcaggattggcaaacagaacaggtgagggcgaataccgccaactaacatgtggttacggttaaacattaaatgctgtggcgtgatggtcgcggcaataaaatcattacctgcaagcacataatcagccgcatctttggtggtgatatgctcgaaaacgattttcagcgcagggaatttttggcggataggctccagaatctgatcgataaagcgggcttcccgatcgaagatatcgacatcggcatcggttacttccccgtgaatcaatagcggcatacctaatttctgcatctgctcgaacagcggataaatccctaaaatatcggacacaccgtgggttgagttcgtagtggcattggcagggtaaagtttggccgcggtgaatacgccttgctcgaaacctgcggtcaactctctttcggtcaactggttggtcagataacaagtcatcagcggagtgaatgtctggcctttaggcaccgccgccaaaatacgttcccgataagcaatggcgctgctaacggtggtaatgggagtggccagatttggcatcactatcgcccggccaaatacctcactggtataagggagtaccctggctaacatttcgtcgtcacgcaagtggatgtgccaatcgtccgggcggcgaattttcagggtttgggattgtgcagtcatttggctagctccactttgatgatgagaatttcgaggttttttgctggtacgggagtgtttccggcggggtgtaaggataagcggaaagtgcgacagatgcatctgattgttcgggttaagttgaaaacaattagaaaaaggcatcttatatagacaggtattgcgtcagtgaattcgatgcaataaacagctatcggtcgtcaggccgacagaagattgaaacaggagagggtaaaatggaagttcgcgtcatcgccagcttagtggcgaaaccagagtttattgaagatgttaaggctattgtgcatcaaattattgagccaagtcgtgccgaaggcggcaatctgcaatacgatcttcatgcggaaatcggtcagccgggtacctttgtgttctttgagcgttgggcctccgatgatgcgctgcaaaagcacaataaaaccgctcatttccaggcatttgtcggccagttagacggcaaattggataatctggatatcaaaacgctgaaacagattgcctgattgactcggtttaatgctcagaaattacggttttcagtcgtaaaaaaacccgccgtgtggcgggttttgtcgttaaggagctcgctgtcagttacttgactggctgaggcttggtagccggtgccgtagccttgttcactgccgcgtgcgcgcccgcagagcctttacctgcaaagtcgaacgcagggcgttgccattcactgtgagctgacgcttgcgtagcctgagttgaggcagaagccggtgctttggtcatcggagcgaatgcatgatgtttgaagcgcacgccttccggatgaacaaccgcttcggtcactacggtagcggccacttcaacggttttcggtgcatcaactactggcgtttccggcgctgcttgcgtcgcagtcacttcagcaacaacggtttcagccacattctcttctaccacagcttttgttgttggcgcggtttcttcaactgcgtcagttgcgctgacaatggtttcggtatgagcttcaaacggtgcttcaacagccagggtttcggcaacaacgtcttctatagtgaccgctttcgctgcgatttcttcaaccgcaggttgagccgtcacttctggctgaacaaccgcttgcgctgctggctggttaaccggagtttcagctttcgtcgtttcaacgccagcagtttccatttcaacagttttaacttcagcagtttcaactgcaacagttttgactacaggcgcctcaacgactggagcagcaactggcgcgcggcccggtacggcagcagctgatgaagatgaaccacctggctgatgtttgtaagccgcaggcgctggcgtgaacgcttcaaccggtttttcagctttaggcgcttcaatcacagcaggttcagcgacaacggctggtaccgccacggtttgttcaatcgctggcgatgcagcaaccgaattcgcctgaccggtggtgactgccggtgctgcgatcacagcaggtgtttcagccgcttgggtattcaggttttctgcgatattttccgctgctggctcagcaacttgctgttcctgcggcagtgcaaccggataacgaataaacaccttgcctgacgccatttccggagaggcaaacgccccggccagaggcatagcggattgggttggataacgctcgtcacgatagcgacgacgacgttgaccactgacacgcaggtgacgtggtgaacggcgtgaacgacgtggcataccattctcgttattggcagaacgatcgttaccgttgtcttcatccgctgctggtgctaacagtttcacttcttcctgtgcaacaaccggagccgcggtttgctcggcgattttaacaacaggagtcttttcactggcggtatccgctgggttcagttcatcattggccgattgaatacgtactttttgattcaattgacgacgctgacgacgctgcatcacctgttggcgttcttcctgctcaggctggacttcttctaccagatttaccgctacaacgctttcaaccacttcagccgctttcacttcctgcggattctgacgttgacgacgttgacgatcgccacgttcacgacgcggttgctgttcttcccgtggcgctttgtcgttgtcgcgattttctaccgtagcttcaaccgcggtattttgctggttagaacgacggttacgacgctgatcttcacggccttcacggccttcacggatgtcacgattatcgcggtttgcatcccgattgccgttgtcacgcgcgttttcacgcgtattttcgcgaccttcacgcggcgtgcggtcaccgcgatctttgcggccattgttctgacggcgcggattacgacgatcttgacgacgattatcggtattttcggttttttcgacgacagccggtttcacttccgcttcagctggtgcggcgaacaggcttttcagaccgctaatcaagcgactaaacagacccggctgtgcggcactgacggctgcttttgctggctgcaccgcaggtttggccgctgccgcaggttcagcttccggtggcacttccgttggcagagagaaggtcgccagcgccggttgttccggacgtttgcgttccattggcgcttcttccagtggctgagccatctcttcttcatgcagtttcggcagcaggtagctcagggtcggaacttcttcacctttacgtacgcgcagcaccgagtaatgcggggtttgcatctggtcgttaggtacgataactgcacgcacgccgccttgacgcttctcaatggcattaaccgattcacgtttttcattcagcagataagaggcaatctggactggaacgatagcgtgaacttcatgggtattctctttcagcgcttcttcttcaatcagacgaagaatcgacagcgacagagattcattgtcacgcacggtgccggtgccgctgcaacgcgggcagacgtggtggctggattcacccagtgacgggctaaggcgctgacgggacatttccagcagaccgaagcgagaaatccggccgatctgaatacgggcgcggtcttgacgaacggcgtcacgcagacggttttctacttcacgctgatggcgaaccggcgtcatatcgataaagtcgataacgattaggccgccgaggtcacgcagacgcaattggcgagcgatttcgtccgccgcttccaggttggtattgaaagccgtttcttcgatgtcgccgccgcgagtagcgcgtgcggagttgatatcaatcgcggtcaacgcttcggtggtatcgataacgatagaaccgccggaaggcaaacgcacttcgcgctggaacgcagattcaatctgagattcaatctgatagtggctgaacaacgggatttcgccgctgtacaatttgattttgctgctgaaatccgggcgacccagagcggcaatatgctctttggccagatcgagaatttttggattgtcgatcaggatttcgccgatgtccgggcgcaggtaatcgcggaaggcacgcacgataacgttgctttcctgatgaatcaggaacggagcagggcggccttcggcggcttttttaatcgcatcccagtgtttcaggcggaatgacaagtcccattgcagcgcgtcggcagatttgcctacgccagccgtacggacaatcagccccatgccgtcaggcaactggagtgaagacagggcttcttttagttcagtacggtcgtcaccttcgatgcggcgagaaatgccaccggcacgcgggttattaggcatcagaactaaatagctgccagcgagactgataaatgtggttaaggctgcgcctttattaccacgttcttctttatcaacctgaacaataacttcctggccttcgcgcaatacatctttgatgtttggacggccatgagaggaataattacttgggaagtactcgcgagagatttcttttaaaggaaggaaaccatgtctttctgcaccgtaatcaacaaaagcagcttccagacttggctcaattcgggtgattttacctttgtaaatattcgcttttttttgctcatggcccggactttcaatatccagatcataaagccgctgtccatctacaagggcaacacgcaactcttcctgctgagttgcgttaatcaacattcttttcatcttaacttactcgttatttttacattggcgttagaactgcgggcaaaataacctcatggccggataaaccgatgaccccgagtcttctagcaaagccgtcaacctcacggttgtcgcctgcataggggcgcattatctcggtaagcctgtgtttctttctgaaaaacagcgcttttagtagagggcagcttctgaatttatgacaacagatctgatcccatttgccggccaagctgcaacccgcagcccgctaattgcttgatttcacattacgtcttacgccattgctgcgtttttgtgcgatcaggcaaacttattattccacaagttccttgatctaacgagaatcaacgcggaattaactgcattattccattgctgatactgatatagcaaggtgactttagctgtctaagtaaagattattttactgtgttcacagtgttggcgagtattgatgtgttattaaacaaaaataatgcgcaaacgttctcttcaatagccagactcacagttaagcacataaaaaggggtggcgctaattcctctgtataattagaatcgcgcaccatgaaaacagataatccagtagtacaattaatcaccatttctgccgacgaagccggtcagcggatcgataactttttgctcgctaaattaaaaggcgtgccaaagagcatgatctaccgcatcgtgcgtaagggtgaagttcgcgtcaataaaggacgcattaaaccagaatataagctggcggacggcgatgtggtgcgtgtaccgccggtgcgcgtggccgagcgtgaagacgcacccgtttcggcaaaactggataaagtcgcggcgttggccgactgtatcctgtttgaggacgattacctgctggtgctgaataaaccttcgggaaccgcggtacacggcggaagtggtctgagttttggcgtaattgaagcgctgagagcgttgcgtccggaagcgcgtttcctcgaattggtgcatcgtcttgaccgcgacacttccggcgttctgttggtagcgaaaaaacgttcggcgctgcgctccctacatgaacagctgcggctgaaaggtatgcaaaaagactatctggcgctagttcgcggccaatggcaatctcattgcaaggcggttcaggcaccgttgctgaaaaatattatgcagagcggcgagcgagtcgtgaaggtgagcagcgaaggcaaaccgtcggaaacccgctttaaagtggaagagcgctttgaacactgcacgttggtaaaagctagcccgattactggccgaactcaccagatacgcgttcacgcattgcatgccggccatccgatcgcttttgatgaccgttacggtgaccgtgatttcgatgcgcaacttaaaggcactggcttacatcgcctgttcctgcatgcggcagctttacggtttgagcatccgaataccggcgaaaccatgcggctggaagcgccgttggataatcagttacgccactgcctgttaatgctgcggaaaaacttcccggcaaaataatcgtgctgtcagcttcgaatagcatcggtaaggcgcaaaagtgcgccttactttgttatatcactctttttattgtcttattattagcgcttatctgcgctgttctgacttaacaacgcattcaccccttgttccatcagcatctcattaagcgcaatcagcggcagaccaatcaaggtattgggatcgcgaccttctaaacggtcgaacagacttattcccaatccctcacttttaaagctaccagcacaattccaaggctgttctatgcttaagtagccgtttatttcgtcatcgcttagcgttctgaaatacacctgaaaagtttcgcactggatatttatatgaccgctagcggaattgagcagcgtcaaaccggtataaaaagtgacacattggccgctggcctggcgtaattgtttaaacgcattctcatgattgtgcggtttgccggttattttcccgttcagcacgcacacctgatcagagccgataatcaaatgctgcggatagtgttcagccaacgcagtagccttggcgctcgccagtctctgcactaaggttggagcgtcttcctgcggcaacgggctttcatcgatatctggcgctgcggtaataaagggcaattgaagtttttccagcaatgctttgcgataagaagaagttgaagccaaaactaactgagacataatattttccataaaccgtggcgtaatttaatcagtcattttaaactgtccgccgctgaggaagcgaatattggtgaaaggtgcggttgaatggcctttttctttgactctatgtcgttacaaagttaatatgcgcgccctatgcaaaaagtaaaattacccctgaccattgatgcggttcgtactgcccagaagcgattagattacgcaggtatctattcccctgagcaagtgacacgcgttgccgaatccgtggttagtgtggacagcgatgtcgtggcctccttatcgtttaatatcgataatcagcgcctggcggttatcacaggtcatgcggacgtcgacgttacgttgatgtgccagcgctgcggtggcaccttcgcacaccatgtccacacaacatattgttttagcccgatcgtcaatgacgagcaggctgaagcattaccggaagcgtacgaaccgatcgaagtcgacgattttggcgaagttgatctgttggcaatgattgaagacgaaattattctttcgctgccggtcgttccggtacatgaatctgaacactgtgaagtgtccgaggcggacatggtatttggtaaactgcctgcagaggtggagaaaccgaatccatttgccgtattagccagtttaaagaaaagtaattaaggagtaaggtcaatggccgtacaacagaacaaaccaactcgttccaaacgtggcatgcgtcgttcacacgatgctctgaccactgccactctgtctgtggacaaaacttccggtgaaactcacctgcgtcaccacatcacagccgacggtttctaccgcggccgcaaggttatcggctgagtagtacttgctaatctttagcaaggcgataccttgacttgtctaaccctagcgttagatgcaatgggcggggacttcggtccctgcgtcacagtgcctgcttcattgcaggcactggcctttaatccacaacttaagcttctgctggtcggaaaccccgacgccatcactccattacttgcccacaccgatcctttgttgctggaaaggttgcaggtaattcccgctgagcatgttattgccagcgacgctaaaccctcacaagcaattcgcgccagccgtggtacatcgatgcgtatcgcattggatttagttaagaacggtgaggctcaagcctgtgtgagtgccgggaataccggagcgttaatggggttggcaaagttgatgattaagccgttagaagggatagagcgcccggccctgatgacggtgatcccgaaccaacgccgtagtaaaaccgtggtgttggatctgggagcaaatgtggaatgcgacagcaccatgttggtgcaatttgccgtgatgggctcagtcatggccgaagaagtcgtggggattacctccccgcgtgtcgcgctgctaaatattggcgaagaagaaaccaaaggtttagataatatccgcgaagccgccgcagtattaaaaaatacaccggcgataaattatattggttatctggaaggcaatgacttgctgaccgggaaaaccgacgtaatggtttgtgacggcttcgtgggtaacgtcacccttaagaccatggaaggcgtgataagaatgttcttgtcgttgcttaaatcatcgggcgagaacaataaacagtcctggtggcttaaactactggggcgttggctgcaaaaacgcgtggccaagcggttcgggcatctgaaccccgaccagtataatggcgcatgtctgttaggattacggggcatcgtaatcaagagccacggcgctgcgaaccaacgtgcgtttgcagttgcaatagaacaggctgtgcaggcggtgcagcggcaggttcctgaaaggatcgccgcgcgccttgaagctgtattacccaagagtgactgaacgtacatgtatacaaagattctcggcacggggagctatctgcccgtacaagtgcgcagcaatgctgatttagaaaaaatggtggaaaccagcgacgagtggatcgtgactcgcaccggtattcgtgaacgtcgtattgcagcaccggatgaaaatgtggccacaatggctttccgtgcggcagagaacgcgctggaaatggctggcgtcagtaaagacgatgttgggctgattattgtcgccaccacctcttcaagtcacgctttcccaagctctgcctgtcaggtgcagcagatgttaggaatcaaagacgccgcggcgtttgatttggctgctgcctgcgctggttttacctatgcgctgagcgtggccgatcagtacgtgaaaagtggcgcagtgcgtcatgcgctggtgattggctccgacgtattgtctcgcgcgttggatccggaagatcgcggcacgattattctgtttggcgatggcgctggtgctgtgttgctgggtgcgtctgaagagccgggtattatgtcaacgcacttacatgcggacggcacctatggcgggttattgactctgccttaccagaatcgcgaaacccaggatcagcctgcttacgtcaccatggcaggtaatgaagtgtttaaagtggccgtgaccgaattggcgcacattgtcgatgaaacgttacaggctaacggcttggatcgttcagaactggactggctggttccgcatcaggcaaatttacgcattatcagcgctacggcgaaaaaattaggtatggggttggataaagtggtgatcactctcgatcgtcacggtaatacctctgccgcatcagtgccttcagctttagacgaagcggtacgtgatggccggattcaacgcggtcaattagtcctgctggaagcgtttggtggcggcttcacttggggctctgcgctggttcgtttttgatttaacagaaagtcttttgatttaatagaaagtcttttgatttcacaggaaggcaagatgtcgaaatttgcaatggtttttccaggtcaagggtctcagaccgtgggtatgctggctgatttagctacacaattcccgatagttgaagaaactttcaccgaagcctcttcggttttaggctacgatttgtggcagttggtgcagcagggtccggcagaagaactgaacaaaacctggcagactcagcctgcgttgctcaccgcttcggtagccatctggcgtgtttggcagcagcagggcggaaaagcgcctgcgatgatggcaggccatagcctgggtgaatactcagcattggtatgtgctggcgttctggatttcaaacaggcggttaagctggttgaattacgcggccaactgatgcaagaagcggtacctgaaggtactggcgctatgtctgctattattggcctggataatgaatctattgccaaagcttgcgaagaatcggcacaaggtcaggtggtttcaccggttaactttaactcgccggggcaggttgtgatcgccgggaacaaagaagcggtagaacgtgccggtgcggcctgtaaagcggctggcgccaagcgtgcactgcctttgccggttagcgtgccttcccactgcgcattaatgaaacccgcggcggataaaatggccgttgctctggaagacattgaattccgggcaccgttgttccctgtggtgaataacgtagacgtaaaagccgaagtgtcacctgaagctatccgtagcgcgctggtacgtcagctatacaatccggtacgttggactggaagcgttgaatttatggcggcagaaggcgttgaactgctgctggaagttggcccaggtaaagttctgactggcctgaccaagcgtatcgtggacactctgtcagcagcaccggtaaacgatgttgcgaccttgaccgcagcgcttgaacaataataaagaggatagcatgagctttgaaggaaaaattgcgctggtaactggcgcaagccgtggcattggccgcgctattgcagaattattggtcgaacgtggtgccgttgtaattggtactgcgaccagtgagaagggggctgaagctatcagcgcctatttgggtgacaagggtaaaggtttaatgttgaacgtcgtggatcccacgtcgatcgacaaggtactggcaactattcgtgctgaatttggcgaagtcgacattttagtgaataatgccggtatcacgcgtgataacctgctgatgcgtatgaaagacgatgagtggcaggatatcctggatacaaatctgacttccgtgttccgtctgtcaaaagcggtaatgcgagctatgatgaaaaagcggtttggccgtatcatcacaattggttctgttgttgggaccatgggcaatgcagggcaggttaactacgcggccgctaaagctggcgttattggttttagcaagtctttggcgcgtgaggttgcttcacgtggcattactgtcaacgtcgtggcacctggctttattgagacggacatgactagggcgttgacagatgatcaacgcgcaggcattttaacccaagtaccagctaaccggcttggggaagctaaagaaatcgccagcgctgttgcatttttagcctctgacgaggccagctacatctctggtgaaacattacatgtcaatggcggcatgtacatggtttaagcactggcagaactttttgcattatttgaggtgaaaaccgcaaaataatgcaaaattgtggttcgaccagccgagatttagttgcatctttttcaacattttataaactacgaaaaccatcgcgaaagcgagttttgataggaaatttaagagtatgagcactatcgaagaacgcgttaagaaaatcatcgttgaacaacttggtgttaaacaggaagaagtactgaacgacgcttctttcgtagaagatcttggcgctgattctcttgacaccgttgagctggtaatggctctggaagaagagtttgataccgagattccagacgaagaagcagaaaaaatcactactgttcaggcagctattgattttatcaacgctagtcagcagtaagcgaacatatctaggcggtcactcgaccgcctaagtttttgtcccaaagtgttattttccctccttggaggacaaacgtgtctaagcgtcgagttgttgtgactggactgggcatgctgtctcctgtcggtaatacagtagaatccacatggaatgctgttcttgctgggcagagtggcatcagcctgatcgaccatttcgatactagcgcctatgcaacccggtttgctggcttagtaagaaattttgactgtgaagaattcatttcgcgcaaagatgcacgaaaaatggatgccttcattcagtacggtattgcggcaggtattcaggcgatgcaagactccggtcttgaagtgactgacgctaacgctgaccgtatcggtgccgctatcggttctggtattggtggcttaggcctgatcgaagaaaaccacaccgcgctggttaacggtgggccacggaaaatcagtccgttcttcgtgccttcaactatcgtgaatatgatcgcaggccacctgaccattaagtttggtttacgtggaccgagtatttctatcgcgactgcctgtacctctggtgtgcacaatatcggccatgccgcccgtatcattgcttataatgatgctgacgtgatggtcgccggtggcgcagaaaaagccagtacgccattgggcgttggcggtttcggtgctgcgcgagccttgtcaacccgtaacgacgatccacaagcggctagccgcccatgggataaagatcgcgacggttttgtattgggcgatggtgccggcatgatggtactggaagaatatgaacacgcgaagaagcgtggcgctaagatctatgcagaagttgtcggttttggtatgagcagcgatgcctaccatatgacctcgccgccggaaaacggttcgggcgcagctttggctatggtgaatgcgttacgtgacgcgggtgtcactacttcgcaaatcggctatatcaacgcgcacggcacttccacgccagcgggtgataaagcggaaacgcaggcggttaaatcggtgtttggcgctgatgcagagaaagtcatggttagctcaaccaaatccatgaccggtcacctgttaggtgctgcgggcgcggtagaatctatctttaccgttctggcactgcgcgatcaagctattccaccgaccattaacttggataacccggatgaaggctgtgatttggatttcgttccgcacaccgcgcgtcaggtttcaggcatggaatacaccctgtgtaactcgttcggcttcggcggcactaacggttcattagttttccgtaaagtgtaacagcgaccgattagtaacacagatgataaaaacccggttatccgggtttttttatagctattgtttgccaatgtaagtgaacagaaaaagataaatccgaaagtagtggaatatccggttgagaaaactttgggatgtaaactcaatgagagcttattaatatgtttgctcactagataaaccaccgaataaataaaagagagttggatatgatgttgataaacggtatggcgcaaaaccagctctctgcaaccgacagaggcttgcagttcggggacggctgttttactacggcgcgagtgcttaatggtgaagtttgctggctgcctatgcatatacaacgcttgcagcaaggcgcggagcgtttactgctgccaactattgactgggcgctattacagcatgaaatgaccgaactggcgtggcaggctcagcagggcgtactgaaagtgattttgacccggggcagcggtgggcggggttacagcggtgaggcctgcgaacagccgacgcgcgtattatcgattagtggttatccggcacattattcattatggcgcgaggagggcatcacgctggcgttaagtccggtagcgttggcgcgtaatccgctgctggcgggggttaagcatcttaaccgtttggagcaggtactgattcgcgcgcatcttgagcagacaacggcggacgaggctctggtgcttgacactgcaggccagctggtggaatgctgtgcggctaatttattctggcgcaaaggcgaggcagtatttacgccggatctcagtcattctggggtggcgggtatcatgcgtcgtcgtattatggcgcgactgtttgcttccagatacgcgttacactgcgtatccgaacccttagagacgctaagagacgcagatgaggtgctgatctgcaacgcgttaatgccgctggtttcggttaatcaagcgcatgaatggacttatagctcgcgagagctgtatgaattcatgcgaccacattgttaatatcgatttaatcgctaatatcaattccaaattttaaagatggccgatagatgaaaagaaaaaacctcagaatactaaccatcctagtggggatctgcttgggtttgctgtttttgggctatcagaaagtgcaaaatttcgccggttccgcgctggaaatcaagcaagacaccatttttaccctgcctgcgggtactggccgagtagggcttgaaactttattactgcaagatcatatcgttgtggatacgactctgtttccgtggttactgcggatcgaaccggaactcgccaatttcaaagccggaacctatcgttttacgccgggtatgacgatacgtcagatgttgaaactgctggccagtggtaaagaagcccagttcagtatccgctttattgaaggctctcgtttgagtgactggatggaaaccttgcagcaggcggattacgtcaaacatgagctggcgggtaagagtaacgctgaaattgctaaactgatcggcctgaaagataccgaacatccggaaggctggctgtatcccgacacctattcttataccgcaggtaccacggatctggctttgctgaaacgggcgcataaagaaatggaaaaagccgttgcccaagtgtgggaagggcgggatagctcgttgccatataaaacgccgaatgatttggtcactatggcttctatcattgagaaagaaaccgcgatcaacgatgaacgaaccaaagtggcttcggtatttatcaatcgcctgcgtatcggcatgcggctgcaaaccgatcctacggtgatttacggtatgggtgataaatatgccggaaatatcacgcgtaaggatttagacaccccaacgccgtataatacctacgtgatcgcgggaatgccgccgacgccgattgccatgccggggctggcatcgttacaggccgcagcacatccggctaaaacgccatatctctactttgtagctgatggtaagggcggacatacctttaccaccaatttagccagtcataaccaggcagtacgcgtttatcgtcaggcgttaaaggataaaaatggacagtaaatttatcgttatcgaaggtctggaaggtgcgggtaaaaccaccgccagagataccgtggttgccacactgcgcgagcagggtattaacgatatcgtgtttacacgcgagccgggcggtacgccgttggccgaaaaattacgcgacctgattaaacaaggtattgatggcgaagtgctaacagataaggccgaagtgctgatgctgtacgccgcgcgggtgcaattagtggaaaacgttattaaaccggcgttggcacgcggtgcctgggtggtaggggatcgtcacgatctttcttcgcaggcttatcagggcggcggtcgcggtattgatagccaactgatgacatcgctgcgcgatacggttttaggcgattttcgcccggatttaacgctgtatctggatttatcgccggcgattggattgcagcgcgctcgccagcgcggggcgttagatcgtattgaacaagaatctttggcgttcttcgagcgcacccgggagcgatatctggcgctggcggcagcagattcaaccattcaaactattgatgcttctcagacactggagaatgtcagcgcggatattcgtcgaacgctgactcagtggttaaacgcgcgggaaagcgcgtaatgaattggtatccgtggttaaacgcaccttaccgccaactggtcgggcaacatatcgccggccgtggccatcacgccctgctgatccatgcgctgccgggcaacggtgccgatgcgctgatttacggattgagccgctggctgatgtgccagaaacgtcagggagagaaaagctgtggcgaatgtcacagttgccgcctgatgctggctggcaatcatccggactggcacgtcctgtcgccggaaaaaggcaaaagcagcattggcgttgaactggttcggaacctgattgataccctttattcccatgctcagcagggtggagcgaaagtggtctggctgcctcaggctgaatccctgaccgatgcggcggccaacgccttactgaaaacgttggaagaaccgccggaaaacacgtatttcctgctgggatgctttgagccttcccgcctgttaccaacgctgcgtagccgctgtttttactggcatctggcttgcccggaaaccgccttgagcatgcagtggctggggcggcaaatcagcgctgagccggtcgccatgctcgcggcgttgcagctgagcgaaggcgcacctattgcggcagagcaactgttgcaaccggcgcagtgggcgcaacgaacggcgctgtgtcaggcgctggtagaggcgttagcccgtcaggatttgttgtcactgttgccgcagttgaatcaggataacgttgccgatcgtgtgtattggctgtcttctttattgctggatgcgttgaaatggcagcagggagcagggaattttatcgtcaatcaggatcagcgcccgttggtgcaacaattggctgagtcagcttctatcgccgtgttgctaaaatcggccaatcaatggctgcactgtcgccatcaattatcttcagtcgtcggcgtgaaccgagagctgttactcactgagcagttgctcaattgggaaaacagactgtctggcgccgatcgtacattttctcattcgttgtaaaagagtttacttattatgttgttagttgattcccattgccatctggacagtttggattatcaggcgctgcacaccagcgtcgatgacgtggtggctaaagccaaagcgcgtgacgtcggttatatgttggcggtggctaccaccttgccgggttttcgtgccatgacggcaatgatcggagaacgtccggaagtggcgttttcctgcggcgtgcatccgttaaatctggaagatggctatgattttgccgaactgcgcgcgttggccgcagcggataatgtcatcgcgatgggagaaaccgggctggattatttctaccagcaggacaatattccgttgcagcaggcgtctttccgtgaacacattcgtattggccgggatctgaataaaccggttattgtgcatacccgagatgctcgcgtagatactctggccattctgaaagaagagcaggcgcaggagtgcggtggggtgctgcattgctttactgaagatatcgcgacggcagaaaccttgttggacctgggtttttatatttccttctccggcatagtcaccttccgtaatgccgagcaattacgcgaagtggctcgttatgtgccgctggatcgtattctggttgaaacagattcaccttatctggcaccggttcctcatcggggcaaagaaaaccagccagcctatgtgcgtgatgtggcggaatacatggcagtgctgaagggcattagtctggaaacgctggccgaggccaccacggctaatttctgtcgactgttccacctggatgatttggcacaatctgccacactcaaatagagcctacgacgataattatttttaagctcgtaattaattccctaagcgagtaatgtttccacccgttttattgtgggtggaaaggtttcactgacgtttctttacaaaaaatagcctttttatactggataaggcatcttcttcaaagaaacgtgactgtcatcaaacattacgcaggctatttattttactcttcgtaataattaaaggggtgctgtagacaccccgattcgcaaaggctttactcccccctttgtaacgccaataaaaagcgagaagcagtaagaaagcactatttactcaggagcactctcaactatgtttaagaacgcatttgcaaacctgcaaaaagtaggtaaatcgctaatgcttccggtatccgtactccctattgcaggtattctgctgggtgtcggttccgcgaattttagctggctaccttcggtagtctctcatgttatggcagaagcgggcggttcagtcttcgccaatatgccgttgatcttcgctattggtgtagctttaggttttaccaataacgacggtgtttccgcattggcggcggttgtagcctacggcatcatggtgaaaaccatggcggttgtggctccgctggtactgcatctgcctcctgaagagattgcagccaagcatttggccgataccggcgtgctgggcgggatcattgcaggtgcgattgcagcctatatgtttaaccgcttctatcgtattaagttgcctgagtatctgggcttcttcgcgggtaaacgtttcgttccgattatctccggcttcacggcgatcttcttgggcgtagcgctgtccttcatctggccaccaatcggtacggcgattcagactttctcccaatgggcagcttaccaaaactctgtagtggccttcggcatctacggcgtagttgagcgttcgctggtacctttcggtctgcatcacatctggaacgttcctttccaaatgcaaattggtgaatacaccaacgcagccggccaggtattccacggtgatatcccacgttatatggccggtgacccgactgcgggtaaactgtccggtggcttcctgtttaaaatgtacggcctgccagcagcggcaattgcgatttggcactcagccaagccggaaaaccgcgctaaagtcggcggtatcatgatttctgcggcattgacctcgttcctgaccggtattaccgagccgatcgagttctccttcatgttcgttgcgccgattctgtacgttatccacgctattctggcgggtctggctttcccaatctgtattctgttgggtatgcgtgacggcaccagcttctcacacggtctgatcgactttgtggtgttgagtggtaacagtagccgcatctggctgttccctctggtaggtatctgctacggtctggtgtactacaccatcttccgcgtgctgattgccaaactggatctgaaaacgccgggtcgcgaagataactctaccgagcaaaacactaaaggcggcactgagatgtcagctgcgctggttcaagccttcggtggcaaagagaacatcaccaatctggacgcctgtatcactcgtctgcgcgtgagcgtggcggatgtatccaaggttgaccaggctggtctgaagaaactgggtgcagcgggcgtagtcgtggccggttccggcgttcaggctatcttcggcaccaaatctgataacctgaaaacggatatggacgaatacattcgtaaccactaattcaggtcggggagtgcaaaaaggaggcttaggcctcctttttttatgggctttacctttgatttcaacgtgtgattctggctgatgtttcttgtggtcagcgggcggtattttccgactctcgccaaggggaggataattcactgagaaaactgggcgattctgcggcacttgcgccggaaattgcttaatgaggttgaaacagatagaaattgtcgctcatactgcatgcactgatttttcccctacgaaggaaatatgttatggccgaagaaacaattttcagtaaaattatccgccgtgaaattccggccgatgtggtttatcaggatgaactggttacggcgtttcgcgatattgcgccacaggctcccacccatattcttattattcctaatatactgatccctacggttaatgatgtcaccgtcgaacatgaagcggcgctggggcgtatgattaccgttgctgcaaaaattgcagaacaggaaggtatctccgaagacggttaccgcttgattatcaactgtaatcgtcacggtggtcaggaggtttatcatatccatatgcacctggtcggcggtcagccactggggccactgctaagtcgaaaataattaagcaatttataattattcggtaaagtgatggctctgtgcatcgcgacttttccggtcatcgctaaatcgaggtatgcctatgcgccgtttcaaggcgtttttactgccgggaatgtttctgattcctgttatcactttactgggctgtagcgcgccgcagggtatcgccgttaaccaacggcaggcggttgtgatggattcgccggttcttaccgccggaattctggcagagaagccggcaatctcgacgctttcggggcggagtattgcaacatcaactttaatgagcagcagcaccaaagccgtcacggtgaattatcgtttctactggtatgacgctcaggggctggatttgctgccgtttgaaacgccccgaaaggtcacgatagggccaaactcatcagtcgatattcagtcaatcaccccgaatctggatgcgcgcagcgtgcgcctctatctgtttttataattgtgttgttggagtgggataatgaaaaggtatttatttgtggcgttggccgcgctggtgctgaccggttgtccttcccggccaccggagccgaccgagcagcctgcgaccattgaacctattaccccggtgccaccgattgaaacaccgccaccggccgataaagttcctcaaccgcctaaagctccccagcctattgactgggcggctagcgtagaaccattggtggcgcaaatggttaacgccaacgatgttgccgcaggcagcgttttgttgctggacagcgttaaaaataataccaacggtgccttacagatcggtaaagctaccgccgcgctgcatcaggtattggcatccaacaagaaatttgccctgattccggctgcgcagttaaccgcagcgaaacagactttaggtctgtcggaggaggatagcctcggttctcgcagcaaagccattggtctggcacgttacgttagcgctcaatatgtgctgtatagcgacgtgagcggcgacgtgaaagcgccagagatcgatatgcaactgatgttggtacaaacgggcgaaattatctggtcaggtcatggtaacgtacagcgttgaagcgagtctgcgtgccttgattgaaactcggataccggcggtgaataccgccggttgccatttcagcccggtatccggcctaactggtgaaagctggcggataaccgggcaaaacttccaatggctggcgcgggaacactcggtcgccaaaagagaattaggcgttaatcgtcagcgtgagcagcgtatcttgcagcagatgtcggcgcgtgcgttatctccgcgagtgatgattgccaatcaacactggctggtggtggaatggctggatggcgtggtggtcgaaccccagcagttcctgcaactggccgatcgaggcacgttggcggaattggtggcgcggctgcatcaggctccccgtaccggctatccgttgaatatccatcgacaattactcggttatagcgaaagaatggatccgtcccgccgcagtgcggactggttgcgactgcataaacgctttatggcgcaaaaaccgccgcgtccgctgaatctggttcctttgcatatggatattcaccctggaaatattatcgagacaaattctggtctgagattaatagactgggaatatgcggcagacggtgacgtggcgttggagttggccgcgatgtttcggtttaacggttgggacaacgcgcggcagcaggcgtttttacgccaatatggtcagcagccgggagcctatcaggatatcgccgctttgacgcggcaaatagcacgctggtctccgtggatcgattatctgatgctgatgtggtttgaagtgcgctggaaacaaaccggcgagataggttttttgcagtgggcagcgccgctgcgccgacgatttaatttatcgggtctggattcatccgccggataacaacatattttattcaatgacgtgaggtagttgtgggtcctgtcatgttagatgttgccagctacgagctggatgccgaagaacgcgaaatcttgcagcatccgctggtgggtgggctgattttgtttagccgtaacttccacgatgccgaacagttgcgtgagctggtgcgacagattcgcgcggcttcccgcgagcggctggttgtggcggtcgatcaggaaggtgggcgggtgcaacgctttcgagaaggttttacacgtttgcctgcggcgcagtcctttgcggctctcaacgataaggaaaccgccgggcgtttagcgcaagaagccggttggctgatggcctcggaaatgattgccatggatattgatatcagctttgcgccggtattggatattggccacgttagcgccgctatcggcgagcgttcattccacagtgagccgcaaaaggcgctggaaatggccgaacgctttattttaggaatgcatagcgcaggcatgaaaaccaccggaaaacacttccccggccacggtgcggtgaccgctgattcccataaagagacgccgagagatacgcgcccactggcagaaatccgcgcacatgatatggttatattccgtgagctgattcagcgtaacctgctggatgccattatgcctgctcatgtgatctacaccgatgccgatccgcgtccggccagtggctcggcttattggcttcagcaggtattgcgtcaggagctcggttttgagggcattattttctctgacgacctctcgatggaaggcgcggcgatcatgggcagctatgcggaacgcgggcaggcctctctggatgctgggtgtgacatgattctggtgtgcaataatcgtcagggggccggtcagcgtgctggataacctgtctccggtcaaagcagacaagctgagtcggttatatcatcgtgggcagttcggtcgcgaagagctacttggctctccacgctggcagcaggccaataaagcgttaacggcgctcagcgagcggtgggacacccataaacaagggttagggaactagcacgtaccggggtgtgtccggtgcgatttaccctgtcgtagcgaggataaagatgatcgtctatttacacggttttgattcaaccagtcccggcaatcacgaaaaggttctgcaactgcagttcatcgatccggatgtgcgttttatcagctacagcaccttacatccccggcacgatatgcagcatttattgaaggaagtggacaaagccattcagcagggcggtgacagtcatcctctgatttgtggcgtcggtttaggcgggttttgggcagaacgcatcggttttctatgtggaattcggcaggtggcttttaacccgaatctgttcccacaggaaaatatgagcggtaaaatcgaccgcccggaagagtatctggatatcgcgaccaagtgcgttcaggattttcgtgagaaaaaccgcgatcgttgcttagcggtgctttcccgtcacgatgaggcattggacagtcagcgcacggcggcagaattgcatccttattacgaaattgtctgggatgaaaagcaggggcacaagtttaaagatctttccgttcacctacagcggatcaaggcatttaaaactctcgattaacatttttttctcatactcgagccccgaagcgatcgttttttgacggtaacttcgggctttttctttcccaaagccatcggtaaacggtgattttgggtaaaaaagtctgaaattattaaactgtgacctgtcgctaactatttgaatattcttctagaaaaaatcctcccgccgcgtctttcagcaaaataaattgatatatatcaattttggtatgaccaaataaccctgcatgatattctgcggtcagataattgaatttactcaagcgaaccctatgttatctaaggatattattcatttacccttagctaacaattggttcacatttagggggtcattttgacaacgccaaagaaaaaaatcgttattattggtggtggtgccggcggactggaactggcgaccagcctgggccataaactgggtcgcagtaaaaaagcggagattgttctggtcgatcgcaaccacagtcatttgtggaaaccattgttgcacgaagtggcaactggctctctagatgacggggttgatgcgctgagctacctggctcatgctcgtaatcaccatttcaatttccaactgggttcattaaccaatattaatcgggaaaccaaaaccgtcagcctggccaaaatctgcgatgagcagggcgacgtgctggtgaccgagcgtgaattgtcttatgacattctggtgatggcgttgggcagtacatccaatgatttcggtacgccgggcgtgaaggaaaactgtattttcctggataacccgcatcaggctcatcgtttccacaacgaaatgctgaatctgttcctgaagtattccgctcagccgggtgaaaaaggcaaggttaacattgctatcgttggcggcggtgcaaccggcgttgagctgtctgccgagctgcataacgcagttaaacagctgcacagctatggtttcgaaggtttggacaatcaggcgctgaacgtgacgctggtggaagctggtgagcgcattcttcctgcgctgccaccgcgtatttccgctgcggctcatcaggaactgaccaagctgggcgtgcgtgtattgaccaaaaccatggtgactagtgcagacagtcaaggtctgaataccaaagacggcgaattgatcaacgctgacctcatggtgtgggcggcgggtatcaaagcgcctgactttatgaaagatatcgccgggctggaaaccaaccgtatcaatcagttagtggttgaaccaacgttgcaaaccactcgcgatcccaacattttcgctatcggcgactgtgcctcttgcccgcagcctaacggcggttttgtgcctccgcgcgcgcagtcggctcaccagatggccagccgttgctacagcaacattctggcgttgctgaatggtcaaagtctgaaaccttacgtgtataaagaccacggctcattggtttccctgtctaaattcagcaccgttggcagcctgatgggtaacttgatgcgcggttcaatgatggtggaagggcgtgtggcgcgagtggtatatatctccctgtatcgtatgcatcaggtagcgttacatggctacaccaaaaccggcctgatgatgttggtaggcgggattaaccgggtgattcgccctcggttaaaactgcattaatagcctgaagttcagtattcgcttagcgaatcggatacccggaaattgagttctgggaagttaaaactcgtagtagcacagagaaccgtcgtcacagtgtggcggcggttttttgttttcggaggttgacccgattttgcgaacagtgattcagattcttatcagagagatttagcgtatcgaattgatattgttatgtttgaaatacaagcagcgtatttagagctaattttatcgcatcaggatattaagtttttcaccaggtgaggcttaaggataatagtccgtagtgcagaaatatgttctggtataaataataaattgcaaaaaaataatgtccggtgttatcagttcgaatgcctccattgatatatagactttttatggttgtaaataaaataaccttgcggttaggtcgtcatcaattaatgttttttaatatatttggcggcgatcatactatcgcctttatcagggctatcttgagcgattaacgtggccggtggttgatacgcccggcggtgtgaaaccgtcgatgctgaaacttatagcagccagtgaaatgagcctaagattctataacagtaaggtttggctggaaagctggcagacaccgcaggctattccgctggcgatacacatgacattgcgcacgccgtcattcgcaaaatcgaacgagtctggttgttgaaaggctcgcaaatgttttcagaaaatcaatcatgaattcggcacccaaacgcggcatcgcgatgatcgtggtgttggtgcggctgggatattgcggaaagtctgtaggcgtttgtcgacagtgatgcctcgctgcaaacccgtctggcagagaggactgggagtctctggtttgcccgattcctttctttgcgcctaagcgcgggtgaatatcagcgaactaagtgctattcagggaatagatgcggatgtttatcaaaggcttaatcctcaggtatgtacactacccatgacaagacaaagcattaatgttaataccctaaatgtcgctcacagtgtcattctggaggcattatttacccccggcttagtgccactcaggcgcagatgctgttgcagcagcggccggaaaaaggatgggaaagcatagagcagttgttgagcgtcgcgccattagccgatgtggatgccaaagtgaaagcgcaggtaaagccgatattgagcgtgaatagccgctacttttggctgcgttcctgtattgaggttaacgacgtgagcttgaccgtgcagtctttgatcgtgcgcaatggcgcacaaaaatttgatgtgctgtggcatcagacaggagaagtggagtgagtgaatctctgaatctttttttcccccttggcgaagcgcagccgatcatatggcgacgtgactcggaaacgcctttcgtaccagaaactaaaggggaatggatttccccatgggcggcgcaggatatgttgacgcaatggccgaaattcgatgcgattcgggtgtttttccccggagaatgggctggtgttcgtaaagttgaattgcctaaagtctccaaaaaacatgcagagaaaatcatccccgcactgttagaggaagacttatgcgaagacattgatgatttacatttttccatactggaaatagatgaaaagcaggccaccgttgcggtgattactcatcagaaaatgcattatcttactcagtggctacatcagggcgaaatattggcgacaacgttattgccggattggctggcgttgccggaaggccatctgctggttagtggtgaacgctgtctgcttcgcacccatcaatggcaaggatggagcgcagaatcgtccctggctccgtacttactcaaggcacagttacgtgaccgtgattcagtgagccagctctgcgtctacggtgagttgcctgcggcactggcgtcggcgctggattcgtgcggtattgagaacacggtatcaggaacgctgcccgcgcctcagactagcggtgcgggtttgctctgtggccgctggaaaccgcgagtgaactatcagaaacagtgggagcgttggcgtccgacgatgacgtcgttaatagtgcttgtcggtgtcatgacggcggaacgactggtgtcattgtggagcatcacggaacgcgcgcagcagacccgcacggcggccgaagagagtttcctccaattgttccccgaacagcggcgcatcgtcaatttacgggcgcagctcaatgccgcgctgcgggagctgggaagtgggaccgcagaggacgaactgctggtgattctacccttggtcgcagaaacgcttgagtctaaaggaatactgaaacagatagatgttcagggaattaaatttgatcaacagcggcaggaattgtatctcaggctgagagccgccgattttgcgacctttgaggcgctgcgggaagatctggcgactgttttttccgtcaaacaagatgcactgctgaaggataacgagcgggttacagggggaatgactttgaaaaggaagcaaaatcatgcgtcttaatttacggcctttgtatcaacggatggtatcaaagggcatgtccatcggggaaggcattctgacgcagcactggcagcctcgctcaattcgggagaaatggctgattggtgccgccctctgtagcctgattttggggggatactattggggaatatggcagccgctaacccgacagatcgcgctgcaagaaggggtattgcaacagcaacgagcgttgattgccaaaatgcgcgccgctgcaccggaaattagcgcgtggcgacagcaaaccccatcagtggcaaagaacgcttctgttacctcattatcacaaagggtcagcaccagcgccgccgagcacaagattacgctgaagcgtattcaggagcgggaaggggtcgttcagatagggctggaacccttgccctttaattctctcttggattggttgaatggattacgtcagaagtcgggcgttcgggcggtgcagttggatattgtcgcggcagaccaacccggagttgtcaaagtgcagcggctggagctggcgaaaatctaagaagaccggttcagtgtttatcgctgaaaaattgtgaggtcagtgccgcaggtaaactgaacattagcggccagcgcgcgatgtaaaaatcattcgagccgatggtgtgcgtcagggaaagttaacctaagatttggcgcgcaaacgggcaagagtcgcaatgacgctgtttaggccgccaattcgccagcaacaacattggccgtttgtccagtcgcatgctgggattgcgcacctaatgccaaacttttagcataaaacccttcgttacatttaatagcttgctaagattcgtcctaaagccgcctttcccctgtggtttccgctgatttggcgtatttatcttattgctgtcctaaatgacattgtgcagactcactcccgataacagaggcgagtcacgcacgccgacgcccgaagttcaaacttacgaggccgctgtcagatttatcgccgttaggcgaaggtactgcggtacggagtctacggcataaattgcgtggtaacattttaggaggatttcctgtgaacaaatcaatgttagcaggcgtgggtattggtatagctgccgctctgggaattgccgccgtggcaagtatggatgttttttccagcggtcctcagtacgcacaggtgatagccgctacgccaataaaggaaacggttaaaacgccacgtaaagaatgccgcaatgttacggtaactcaccgtaaaccggtgcaggatgaaaaccaaattgcaggatcggtactcggcgcagtcgcaggcggggtattggggcatcaagtgggtggcggtcgcggtaaagatatcgccaccgtagcaggcgcgttagccgggggttacgccggtaaccgggtgcaaagcaatatgcaggaaagcgacacttacaccaccacgcagcagcgttgccagacggtgtatgacaaatcgcagaaaatgctgggatatgatgtcacctacaaaattggcgatcagcagggaaaaattcgtatggatcgtgatccaggtacgcagattcctgtcgataaaaatggtcaactgattctgagtaatcgagcataacgaaatatttgtggtccaagacctcgtaacaagagcccgcggtgtagtgttagttctgatcgtttaatagtcagtcggggtggttatccgcccctaccgttaagcgagtggcattagcattgacgcgggtttccttctgcctttcccgcgccaacactattccctacatcaattatctagataaattctttatatcaatagtcatcgaggccaccttataaccgcgtggttaagcgatacggtgctgttcgaaagaggccagtagttcctcaacaaatttcaaacgtttggtccgatcgcttaaatcctgcataaacttcagcttggttgggccttctaatcggaatatctgcggctgacgctgcaataaaccaatcagatacaccggatcgaccttgtttttctcgccgaactcgataaaaccaccgcgttcattgccttcaatccgtttaatgcccagtttttgcgcatgttgacgtaacgaagcggtttgcagcaggaatcgcgccgcatccggcaacagaccgaaacgatcgatcagttcgactttcagttcatccagctcgacgtcatcgcgggcgctggcgatacgcttatagaatgaaagcctgatatttacatcaggaataaaatcgtcgggcaacagcaccggcatacgcatttcgatttcggtctggttgctggtgagatcctccagcgacggttcgcgcccttctttcaatgcatcgaccgcgctttccaatagttccatatacaatgagaaaccaatggtcgtcatctggccgctttgatcttcccccaacagttcccccgcgccacgaatttccagatcgtgagtcgccaaagcgaaaccggcgccgagatcttccagtgaagcaatggcttccagccgttttttggcatcggtcgtcatggctttcggatttggcgtcagcaggtaagcgtaggcctggtggtgagaacgaccgacgcggcctcgtagctgatgcaactgcgccagaccgaagtggtcggctcgctcgataataatggtattggcgctaggaatatcaataccggtttcaataattgtggtgcagaccaaaacgttaaagcgttgatgatggaaatcattcatcacccgttccagatcccgctcacgcatctgaccgtggccgatagcaatgcgggcttctggcaccagttccgccaaacgttgggctgctttctcaatattttcaacgtcgttgtacagataataaacctgcccaccgcgtaatacttcacgcagaatggcctcgcggacgaccagattgtcgtattcgcgcacaaaggtttttaccgccaaacggcgcgctggcggcgtggcaataatcgacaggtcacgcataccgctcatcgccatattcagcgtgcggggaatcggcgtagcggtcagcgtcagaatgtccacatcggcgcgcatggccttgattcgctctttgtggcgcacgccaaagcggtgttcttcatccacaatcagcaggcccagatctttccagtgtaaatcactttgcagcaatttatgggtgccaatcagaatatcgattttcccttctgccgcctgctccagaatcacctgctgctcttttgcgctgcggaaacgagaaagcatttcgatacggaccggccaggtagcaaaacggtcgcggaaattatcaaaatgctgctgcgccagcagggtggtcggcactaatactgccacttgcttattattattcaccgcaaggaaagccgcgcgcattgccacttcggttttaccgaagccgacgtcaccacacaccagacggtccatcgccaacggttggcacatatcgctcagcaccgcattaatcgcctgttcctgatctggcgtggtttcaaacgggaagctttggcagaacagctgatattgttcgcgatcctgtttgaatttaaagccggacttcaccgcacgctgggcgtaaatatccagcagctcggcggctacgtcccgaactttctccgcagctttctgacgggcgcgggtccaagcgtcaccgcccagtttatgcagcggcgcgttttcatcggcaccgccagaataacggctgatgaggtgcagggaggatacaggcacatacagtttgtcttccccggcataggtcagaatcagatattctgctttgataccaccggcttccagcgttgtcagaccaagataacggccaacgccatgctccagatgcaccactggctggccgggacgcagttccgccagattgcgaatcagagtatcggtattaatagtgcggcgattatcctggcggcgacggcttacgcgttcaccgagcaaatcgctttcgcaaatcagcgctagctgacgaatatgatcgagaaaaccgcgttccgccgcaccgatcatcaaatagtgaccggtttttttcacttcatccaaacgggaaatcagcgtcgggcgtaatttaatccggcccagtaaatcctgtagggtttcgcgtcggccttcactttctaccgagaacactacgctgccgctgaagccttcaataaagcggcgcaggttatctaacggagctttcgcctgtgcctgtaccgcgacgtcaggcaacccctgataatccagattggtgttggcggcttttttcggcagaacgtcagttttaagttgaatgcgtggccagtctttgagctcgctaaacagaccgtcagtccgcagccacagggtttccggtgccagcaaaggccgcatggggtcaatgcgacggctttcataacgctgattgacatcctgccagaaacgctcggcggcggcttccagatcgccggtattcaccaataaggtgttgtccggcaggtagctaaatagggtgggtaacgcctgactgaaaaatagcggttgccagtactcaatacccgcaggccagatgcctttgctcacctgctggtaaatatgttcagggtcgcgtcggacttcaaactgctcgcgccactggctgcgaaatagctcaatggcggcctgatcaataggaaactcatgagcaggcaataaattgatgtgttccacttccgacagggtgcgttgagagtcaacgtcaaatacccgcaggctgtcgatttcatcatcaaaaaaatcaatgcgataaggttcttcgctgcccattggatataaatccaaaagcgctcctcgggtagcaaattcaccgtgttccatcacctgatctacgctgcggtagccagcttgctccaattgggaacgcagtttatcgcgagataaatgctggccttttttcatgaccagcgcgtgaccgtgcaggaattcgtgaggacagacccgctgcatcagcgtatttacaggaagaatgatcacgccgcgtttcatcgccggtaactgatacaggcaagataaacgggtggaaataatatcctgatggggggagaaactgtcgtaaggcagcgtttcccagtcggataaagtcgtgacgctgtgggcagtaaattgctgaatttcatcccgcaggcgcagggcattttgcatatccggcgcgattaacatcaccggtcccggatggcgttcaataatttcggcgcattcgatggcgcaggcagcgccggttaattggcctaactggcgtatatcgccacggcgctcaggtaatgagtaacggtattgttgggacataagcagttaagcaatctctttggttcagcactgcggcaataacgatattgcctatcctagcatgcgatgacgcaaggctgtggaattggcgctatttctggaataaaagccggagatataggctgttagtggttccataaagcggcggtacgctttattatcctcgatcactttgctttagcaacaggatctcaacagatttcatgtatcaacctgtcgcactatttattggcctgcgttatatgcgcgggcgtgcttctgaccgctttggccgctttgtttcctggctgtccaccattggcattactttgggcgtgatggcgctgataacggtgttatcggtgatgaacggctttgaacgggacttgcagaataatattctggggctgatgccacaggcgttgattactacgcccaaaggctctatcgacccggaaaaaatccccgcctcggcgctaaaagggctaagcggtgtcagcgatattgtgcctttgaccaccggtgaagtggtgttgcaaagcccgcgtagcgtgaacgtcggcgtgatgctgggtgtcaatcccgaacagcacgaacccttaaccaattcgctagtgaatgtacatctgcgtgatctgcaaccgggtcaatacaacctgattatgggtgaaaagctggcgggaaaactgggcgtgagtcgcggtgaaaccattcgcctgatggtgcccagtgccagccagtttacgccgatggggcgcattcccagccagcgtttgtttaacgtcattggcacttttgccgctggcagcgaagtggatgactatcaattgctggtgaatcagcaggatgcttctcgtctgatgcgttacccggcggggaatatcactggctggcgtttgttcctcgatcagccgttgcaggtggattctctcagccagcaaaacctgccggaaggcacggtgtggaaagactggcgcgagcgtaaaggcgaactgttccaggctgtacgcatggagaaaaacatgatggggctactgctgagcctgatcatcgccgttgctgcgtttaatattattacctcactgggattactggtgatggagaagcaaggggaagtggcgattctgcaaactcaagggcttacccgacgccagattatgctggtgtttatggtacaaggggccagcgccggggtgattggcgcgttgcttggcacgggcttaggcattttactcgccagccagctcaatgtgctgatgccggttctgggcctgttgctagacggcgcggcgctaccggttgccattaatccgctacaagtgacggtgattgcgctgttggctatggccattgcgttgctgtccacgctttatccttcctggcgcgctgccgccgctcaacccgctgaggctttacgttatgagtaaccaacctttattgcagtgcgaaaacctgtgcaaacgctatcaggaaggacaacttcataccgacgtattgcgtaatgtgacctttaccattcagccgggtgaaatgatggcgatcgtcggtagctccggctccggcaaaagtacgctgctgcatctgctgggcggattagattcgccaacctccggcgaagtcatttatcaggggcgctcactgagccagctttcttccgccgccaaagcggagttacgtaaccgcgaactcggttttatctaccagttccaccatttgcttccagactttaccgcgttggaaaacgtggcgatgccgctgttgatcggcgggactaaaccggcagaagcgcaagataaagcgcgtgccatgttggcggcggtggggctggagcagcgcagtcagcatcgtccttccgagctttccggcggtgaacgtcagcgcgtggcgattgcccgttcactggtgaataacccatcgctggtgttggcggatgagccaaccggcaacctcgatcagcgcaacgcagacagtattttcaatctgttaggtgagctgaacgtacgtcaggggactgcgtttctggtggttactcatgatttgcagttggcaaatcgcatgagccgccaactggaaatgcgtgacggtcagttacagcaaaatctgacgttggtgggagcggagtaatgcgcagttcacctctttcactgctaataggcttgcggtttagtcgtggtcgccgtcgcggcgggatggtatcgatgatttcgatcatttccactctgggcattgccttgggcgtcgcggtgctgattatcggcctgagtgcgatgaacggcttcgaacgtgagctgaaaaaccgcgttttggccgtggttccacacggtcagatagcttttctcgatcaaccgtttaacgcttggaatgcgagcctgcagcggatcgaaaaagtacccggcgtcgcggcggcggcaccctatattgatttcactggactgatggaaaacggcacccaattacgggcggtgcaggtcaagggcgtcaatccggagcaggaagaaaaactcagcgcgttaccacagttcgtgcagaacaacgcctggcaagattttcaggctggtcagcagcaggtgattttaggtaaagggctggcggacgcattaggggttaagcaaggttcctggctgacggtgatgatcccaaatagcgatccggaaatgaagctattgcagccgaagcgtattcgtctgcaagttgccggcgtgttccagctcagcggtcaactggatcacagtctggcgatggtgcccctcagcgatgcccagcaatatctggatatgggcgatagcgtgaccggtattgcactgaagtttaatgacgttttcaacgccaataatctcacgcgcagcgccgcagaagcctccaatgcttatgtgaattacagcagttggatcggcacttacggctatatgtatcgcgatattcaaatgattcgcaccattatgtatttagctatggtgctggtgatgggcgtggccagttttaacattgtgtctacgctggtgatggcggtcaaagataaaagcagtgatattgccgtgctgcgaactttgggtgccaaagacggcctgattcgggcaattttcatttggtatggcctgctggccgggctggtgggaagtatcagcggcgtggtggtcggtgttgtcgcttcattgcagttaaccaatattatcagtgggttggaaacgttgatcggtcatcatttcctgtccagcgatatttattttatcgattatctaccttcagaactgcattggttcgacgtggcctgcgtattagccacggccattgtgctaagtctggtggccagttggtatccggcccgtcgcgccagccgtattgacccagcgcgggtattaagcgggcagtaacagcgcgatcacaatagacgaggaatccggttgttttagccggaactgaatggtactgataaaccgtttactgaataaaggtaaagttatgtattacggttttgatatgggtggtaccaaaattgaaatgggcgtgtttgatgccgatttacagcgtatttggcaaaaacgtgttccaacgccaaaacaggattatcagcaattattgcaggtactgacggaactcacccacgaagccgatgagttttgcggcgcgcagggcagcgtagggatcggtattcctggtttacccaatgacgacggcacgttgtttaccgcgaacgtactggcggcaatgggcatgccgttgcaagccgatctttcccgtctgattgggcgggaagttcgtatcgataacgatgccaactgtttcgctttatccgaagcttgggatccagaattccagtcttatcccagcgtgctggggattatcctgggcaccggcgttggcggtggcattattctcaacggtcaggcgatgaccggacgtaaccatatcagcggtgagttcgggcactttcgcctgccaattgatgcgctcgacgttttgggtgcagatattccccgggttccctgcggttgcggccagtacggctgcattgaaaactatatttcaggccgtggttttgaatggatgtacgcccatttctacggtgaaacgctacccgctacgcgcattatcgaaaattactacgccggtaacgcacaggccacagagcatgtcgaacgttttatcgccgttctggcgatttgtctggggaatctgttgaccattattgacccacatttggttgtgataggcggcggattgtcgaactttgaacatctgtatcaggcattaccgcagcgtttagctgcgcatttgctccccgttgcgcgtttaccgcgtattgagaaagctcgctatggcgatgctggtggggtgcgtggcgcggcgttcttgcatctgtctgatagaaaaacattataaataaagtaaaagaggcaataggttatgcgcattcgccatcggctgtgtcggtttcgcaagaataagcatctgcgtcatcaacgttttcgctctcgtattttccaccgtgatagttccgccagtacagaaatgaagaaacctttcgtggtcgtactcaccggcgcaggtatttctgctgagtctggaattcgtacttttcgcgcggcggacggtctatgggaagaacataaagttgaagacgtggcgacgccggaaggctaccagcgcgatcctaaactggtgcaggctttttacaatgcgcgtcggcgccagctacagcaaccggaagtggcacccaatgctgcacatttcgcgctagcagatctggaggcggtattaggcgataatttcctgctggttacgcaaaatatcgatgatcttcatgagcgggctggcagtaaacgagtgattcatatgcacggtgaattactcaaagtacgctgtactcagtctggtcaggttctggattggccgggcgatcttagcgccgatgagcgttgtcattgctgccagttccctgcaccgctgcgcccgcatattgtgtggtttggtgaaatgccgatggggatggatgatatttatcaggcgttggctgaggctgatttctttatttccattggtacctccggccatgtttatccggcggcaggttttgtacatgaatcggcgttgaatggcgctcatactgtagaactgaatctggagccgagtcaggtagaaagccagttcgaggaaaaacattacggcttagccagtaaagtggtgccggagtatatccgcgagtttcttaccactcgcggagaaaaccgcgaaggcgaataatttcctcagggattactgcgtttttttatgcagggacatcttggcaatgtccctgtgtcatttctgtcatagcgttattattctggcttaagtttgtttaaaactgacctgacgcaatatttgatcgtgatcacttccccataatgatatccatcattttgagggtgggaaccatggacaaattactcgatcgcttttttaactatgtctctttcgatacacaatcaaaagctaaggtaaaatccgtgccgagcaccgatgggcaacgtaagctggcggcagcgttgcaacaagagctgctggccttgggctttgagccggtgaccttgagcgagcacggctgcgtgatggcaactttaccggcgaacgttgactgggaagtgcccacaatcggttttattgcccatttggataccgcacctgatttcagtggcaaaaatgtcaatccgcaaattgtggagaactatcgcggcggcgatatcgcgctgggcatgggcgatgaaattctgtcgccggtcatgttcccagtgttgcaccagttgcttggacacactctgattaccaccgacggtaaaaccttactgggtgccgatgataaggctggtattgccgaaatcatcaccgctattgtgcgtctcaaagagaacaatattccccacggcaagattcgagtggcgtttacgccggatgaagaagtgggaaaaggcgcgcaattctttgatgtaaatgcttttaacgccgattgggcctataccgtggacgggggcggcgtgggcgagctggaatatgaaaacttcaatgcggcctcggtgaccatcaaaattgtcggcaataatgtccatcccggcagtgccaaaggggtcatggtcaatgcgctgtcattggctactcgttatcatcaatcgcttccggcagatgaaaccccagaaaataccgagggttatcagggtttttaccatcttcaaagcattaaaggcacggtagaacgggctgaaatgcattatattctgcgcgatttcagccgcgatggcttcgaagctcgtaagaaaaacatggtggatattgccaaacaggtcggtaaagggttacatcgcgattgctacatcgaaatcattatcgatgacagttattacaatatgcgtgaacacatagtggagcatccgcatattattgaactggcgcagcaggcgatgcgtgattgcgatatcgaacctattatgaaaccgattcgtggaggcaccgatggcgctcagctgtcgttccgcggtttgccttgcccgaatatttttaccggcggttataatttccatggaaaacatgaatttattacgcaggaaggaatggaacaggcggtgtcggttattatgcgtatcgccgaattaaccgcgctacgggccaaaaacgctgaaccgcagagcgagaaaaacgcagctttgatgaaatgatattgcgataaataaaggcgtgtttcgtatagattcgcccaataaaaacgccccttaggtcaaaacccgaggggcgtttttttagctttaaactgccggatatctcacaagttaatcgcggaaataccagtagccgctgttaaccagctcggtcagcgtcgccaagaaggacggctcgtctaacgcatcaccgagcatttcggcgctaacgctaaagtgttggcacaacgcatcggccgcaggcaggtgcggagtatcgatcaattcgccgttaacaaagcaattatcacctaggcgaataacccgcagtccgctcaggcgatgtaactcttcaccttggctcagcaactcatagatctcaccagcctgataaggcggttccggtggcgaaatatccagttcatggcgagactgggacacgaactcgccgaaccagtgttggaaatgctcaggctgttggaacaattccagcatcatttggcgcagcgtatccatttcctctggcaatacgtccgccggacgattacgcagtttcagatctggatcgctataacgcttgctgcctaactctctggccagcacgtaatcggcaaagccgctgaccagttcccggccgttaggcgcacggaacccgacggaatagttcagcgcgttttccaacgcgtagccttcgtgcgggaatccaggcggaatatacagaatatcgcccggctccatttcttcatcgataatggcgtcgaatgggccgacttgcagtaaatcaggatgaggacagtgctgtttcatcggcactttttcacctacgcgccaacggcggcgacccgtaccctgaataataaatacgtcatattgatcaaaatgagggccaacgccaccgcccggtacggaataggagatcatcagatcatccattcgccagtctgatagcgcacggaacggacgcatcagcgctgccgatggctcatgccaatgatcgacggcctgaaccagcagagaccaattggtttcccctaaatgatcgtagctctcgaacggcccgtggctgacctgccagcgaccttcctgatggctgaccaaacggctatccacctccgtttccatagccagaccggctaattcatcgggagatagggggtcgataaagtttttaaagccgcgtttcaggatcacggggcgcttttgccaatagcgttgcaggaagtcttgccaatccagatcgagttggtaatccattttttatcccagggattgagtgaacttgcgaatgattataacggatggcgcgtgacagtatcaggggcagggcggcaaattttgtaggaatggcactggatgcagaaaatgcggacgattctctgcgtccgcacagagcatttgagaaatttatttggcaaatgaatccggttatgaattattcgtcgtgatgctgatcttgctgtcgcccaaaggttaccagcattttggctccgcctaagggactgtcggtaacggaaattcgcccctggtactgttcaataatttctgccgcgacggataatcccagcccttgcccaggacgtaaggtatcaacccgctgaccgcgttggaaaatcacttcgcgcttgctctccggaatgccagggccgtcatcgtccacaacgatggtgagttgtttttccgagtgcagggcggtaatttccacgaactcgagacagtatttgcaggcattttccagcacgttgcccatcacttccataaagtcgtttttctcccccataaaggtgacctcgggggagatatccagagtgagtacgacgcctttacgctgataaaccttgtttaatgcactgcataaactatctaaaagcgccggaactgaatggatttcccgagctaatacattgtgttcagagcgcatgctagcgcgatggagataatagccaatctgctgggagattcggctaatttgttccagcatgataggctccacttcttcgatagtggcctgtttgccggagcgcaacgagcgcagcgtggtttgcagcaccgccagcggggttttaagactgtgggtcagatcggaaagtgttgtgcgatatttggtatagcgctggcgctcgttggtcagcaaaatattcaggtttcgcaccaagctgagcaactcgcgcggcggattttcatccaactgttcccgctcgcctttttccagctggctgatttggctgaccaaagctttgatagggcgcaggctccagtacgccgccagccacaacagggggacgaccaacaacaggttggcgagcagtacataactaaaccagttccataccatatccgaacgctgtagctcttgcggaatagtatctaccaccacaatggttaaagcgggaaggcgttcggtcgcctgatatgcgttgacggaaaccgagtgcgttagcgcgctggcgtcggtgtcgtcgtatttcttcagctgatcctgcgctttggggttgtcccctaataccgcgctactgatttcggtaccggtatccaactcatagaacccgggtttgctaagccagcttttctgaatatgagattccagttcaggcacatggcgctgtcgccacagaatgttgccgttatggtcataaatcagtaccagcgtaggaacattcagctccagctcgggaggaatggtaatgctgagtttgttgtcatgccattgagccagactaaagaacagattgctttccccccgatgagcgcggaaggtgtttttatcgaagctaacaatatagcccaccaccgctaccattccgtaggacagcgaaagcgctagaatcacgcccgccgtagccatcaggaagcgggcgcgcagggagaaaggtttactgttcgatttaaacatggcgattagttggcatcaaaccggtagccttggccacggatagtggtgataacttctttttcgtgttcggcctgcaattttttgcgcaaacggcccattaatacatcgatggtatggctttcgcgtagttcagcgtcggggtagagctgtagcatcagcgtgtctttactgacgactttgcccgcgtttcgaatcaaagtttcgataatggtgtattcaaaagcggtcagtttgatttgttgctgattcacgcacagttcacggcgagagagatcgataaggaacggcgggaattcgataatctgcgaggccagaccgctgttgcggcgcatcaatgcctgcatacgggcaatgacttcttccagatgaaagggcttggtgacgtaatcgtcggcaccggcttccagtaccgccactttatcctgccagctttcacgggcggttaataccaaaatgggcaacttggtttgatgactacgccagcggcgartcaggcttagcccgtcttcacccggcaggccgagatcgataatggcgatatccggagcatgttcctgcaaaaaatagtcggcttctttcgcatcttcggcggcatcgacctggtgtcccatctcgcgcatctgtaccgaaaggtgatgacgcagtagagcattatcttctacgactaaaacgcgcataccaaattcctcaaaaaacttgaaccgggtaaaaacttacccggaaaaataagggtgagattgatggatcagaaagtataacgcaaaccaacctgaccaatctgatcgtctaccttccagttatggtaggtataaccgacttcagccgccagactttgcgttagggcatagctcgcctcaatacgtgcttcgtgatacatcttgctatcatattccgccaggcgataggcaacgtctaagccaatgtcctgggtcaatttagtcttgataccgacttcaccggtcgcgctgttgtaagcttctgttttatcgccatctttcttaacatcgtacagcattgcgtggcggcttgcaccggccagcaggtacatatccgcatctggcgtcagagcaaaatgataacccacgccaagcaaaccatcgcccataccgcgatcgttatctgcgatagcgcywwgsckwkykgccatgaacagattgttttcaaagccataaccgccgtttaagtagaaaccgtgcattttgtcgctaccaatgtggctggtgccagattggttaaattgcttatcgaaactttgcttattatcaatggaaccgaattgaatacccccggcgataaaggtgtaatcatccgcgatagccaaagtgctagtagcgataagtgccgctgctaataaagattttctgaacataactgctcctatgatagttattccctggatgtccgcaggcaattatcaacgggagaaactaaacctttattcaacaagggggcagtgtaagtaaatgatagttaaacggcagagcgtcggatactgaaaaataagcaggcgacggggagccgcctgctgcaaagacttacttcagttcatccaccagtgcgacggcacggccaatataattggctggcgtcatggttttcaaacgaactttttcttcttctggcagcgccaagccatcgataaaggcttgcataccggcggcgtcaacacgtttgcctcgcgtcagctctttcagtttttcgtatggtttttcaatgccataacgacgcataaccgtttgaatcggctcggccagcacttcccagttatgatccaattcgtccaacagatgaggttcgttaacttccagcttgctgatgcctttcatcgttgactgataggcgatcaacgcgtagcccagacccacgccgaggttacgcagcacggttgagtcggtcaggtcgcgctgccagcgggaaaccggcagtttgcttgccagatgccccaatacggcgttagaaagacccagattaccttcggagttttcgaagtcgatcgggttaactttgtgcggcatggtggaagaaccgatttcacctgcaatagttttttgtttgaagtgattgagtgcgatgtaaccccaaatatcacgatcgaaatcgatcaaaatagtgttaaagcgcgctacgcagtcaaacaattcggcgatgtaatcgtgtggctcgatttgtgtggtgtacgggttccagttgatgcccagcgaggtcacgaagctctcgctaaactggtgccagtcaacttccggataagccacgatgtgagcgttatagttgccgacggcgccgttaattttgcccagaatttcaacctgagacagctgacggaactggcgctccatacggtaagccacgttcgccatttctttgccaacggtggatggcgttgcaggctggccgtgagttcgggacaacagcggcaaatcgcgatattggtgggccagtgctttgatggcgtcgatcatctggcgccagaaaggtaaaatcacttcctgacgagcggtttgcagcatcagagcgtgagacaggttattgatatcttctgaagtacaagcaaagtgaatgaattctgacactgcatgcagtgcaggaatgctttcaactttctctttcagaaaatattcaaccgctttgacgtcatggttagtggtgcgttcgatggccttaatgcgcagggcatcctgttcattgaactctgccacgatcttgtcgaggtaagcgtttgcgttggcatcaaaagcagggacttctttaatttctgcgcaggctgccagtttttgcagccaacgtacttcgacctgcacgcggaatttcagcaaaccaaattcgctgaagatagcgcgcagtgcgctgactttgtcgccgtagcgtccatcaattggggatacggcggtcagtgaggataattccatcggtagcaactcctgggatcaaatattaacgatgagcaagaatactctgcgcctgcttaaacagacgattacgagaaaacataagctgtaaacggcttccacctacctgttgccacagcaccgcagagcggataccggctaacagggcggcgcgaactttggcctggattaaggtgctttgcagcatggccgggttgccggtaacctgaatgcgcggcccaagtgggctaattacatccacataaatggcggccagagcgctcatcatagtctctgattcgagatcaaaatgagcgagctgacgatctaactgactgatacgttcgcccaaggtgctcatggctgactggtgagcatttagcttccgctccaataccatcaggctcagagcgtaacgcgtcagttcggcgctagggccttggcggttggcattcagcactacctgcaaggtttccagccccatggtgaggaatttctcatctccaccgtacaccgcaagagtcgaatcgggattggtcagcagcacgctgttgagtgaagtatgcagtgcctcgttgtcgcattgaccttcgtgagccagttgctgaaccagacgcgcagactggcagatacctgccagcgccagcgtgatgtcgtaataattctttgccacgattgctcctgtcgagattattggtcgctaacggggtgacgtgattcgatgataccgccgccgagacagatttcgccctgataaaacaccgcggactgaccgggggtaacggcggcaaccggattgtcgaaacgcacatcgatacgttcgtcatccaacggcgtaaccgtgcaaggaatatcttgctggcggtaacgggttttcaccacgcagcggaatggagccgtaaccggttcgcgatcgacccaatgtaattgctgagcaatcaaaccggtagacatcaaacgcgggtgctcatggccttgggctacaatcagcaagttgttggcaacgtctttatccaccacataccacgggtcatcgccaccttctttggtgccgccgatacccagacctttacgctggcccagagtgtggtacatcaaaccttggtgttcgccgacgtgtttgccttcaacggtcataatcgggccgggttgagcaggcaggtaacggccgaggaaatcgcgaaatttccgctcgccgataaagcagataccggttgagtctttcttcttggcggtaaccagatccagctcttccgcgatacggcggacttccggtttttccagttcgccaaccgggaacaggctttgcgccaattgatcgtggcccagcgtatataagaagtagctttggtctttattgccatccagaccgcgcagcagttggcttttgccattgacatcgtggcgacgaacatagtggccggtggcgatgtaatcggcgcccagatcttcggcggcaaattcaaggaaggctttaaatttgatttctttattgcacagaatatccggatttggcgtgcgcccagccttgtactcttcgaggaagagttcaaaaacattatcccaatattctgcggcgaaattgacggtgtgtaactccatgcccagcttatcgcacactgcctgagcatcggccaaatcggtcgctgcggagcaatattcttcatcgtcgtcttcttcccagttcttcatgaacaggccttcaacctgatagccctgttgttgtagcaggtaagctgaaacggacgaatcgacaccgccggacataccgacgattacttttttctggctgttatctgacatgggagtctcactaacttaagcgccgagcgtgctgacaatggataatccgtttcgcattgcgcggcaaacaaggcattacaaaaacaagcgtcggattttatcacgttgcctgtcggggcgcaccgcacaatcacggcttagggtaaattacgccaattaattatcgggctgaatcaatgtggccagttaaaggtactaattagatcgagcgagtagcgctcaggctgcaaataacagcggatactttcggcaaccagaggagagcgcagattgggtgcgtgcaatatttcatcggcggttagccacaggcagcgatcgatatcgctatcgtgaggctgagtaggcaaaatggttaccagttcaatcacaaaggcgaagcgtaggaacggcgtattatcgggtgcaacccattgatgcatccgtaaaaaggattgaggcgtcgcgcgaataccggtttcttcccacagttcgcgttctgcggcctgtagcaaggtttcatcggcttccaaatgaccggccggttggttccacagcgctttgccattaatagtttcttcaaccactaaaaacttgtcttgagaatgcaccacgcaggccacggtaacatgaggtttaaacatcgttaatctccttccattggccgggttgtaaatctcccaggctaagattacccatactaaaacgaatcagtcgcagggtaggaaaaccgacgtgggcggtcattctgcgtacctgacgattgcgtccttcgtacagggttattttcagccaacgggtcgggatagatttgcgctcccgaattggcggatttcttggccacagccactccggttccggcactttttcagcgccagcgggaagcgtggggccatcttttaacgtcacgccctgacgtaaacggcgaagtgcttcttcgtccggttcaccttcaacctgaacataatagaccttaccggtttttttccccggttgcgtcagttttgcctgtaatttcccatcgttagtcagaaccagcaaaccttcgctatctctatccaaacgaccggcggcataaacatcattaaaaggaataaaacccttcaatgttgcccgtccagcctcatcggtaaactgtggtaacacatcaaatggcttattcattaacaccacgcgacgtgggccttgcaccggcgcaggtttcgcctgtgagcgggagctgaatcggttaactttgtgatttttaacagagattttattcatgatgattgcgcttccagttgattagcgcattatacatcaatccgttttggattggcgtgaaacgaatattcaagtactattgacaagaatcttacaaggcattaacaaaaattgcgctgaaggagaggttgatggaaagcaaagtagttgttccggcagaaggtaaaaaaattacggtcgacgctaagggtaaattagtcgttcctaataacccgatcattccgttcattgaaggcgacggcattggcgttgacgtgactcctgctatgatcaacgtagtggatgcagcggttaagaaggcctataacggcgagcgtaaaatctcctggatggaaatttacaccggtgagaagtcaactcaggtttacggtaaagatgtctggctgccagaagaaactctggatctgatccgcgattatcgcgttgccatcaaaggcccattgaccactccggttggcggcggtattcgttctctgaacgtggctctgcgtcaacagcttgatctgtatatttgcctgcgtccggtacgttattacgaaggcaccccaagcccggtaaaacacccagaactgactgatatggtgattttccgcgaaaacgccgaagatatctatgccggtattgagtggaaggccggttcaccagaagctgagaaagtgatcaagttcctgcgtgacgaaatgggtgtgaagaaaattcgcttccctgaacaatgcggtatcggtgtaaaaccttgttcagaagaaggcactaaacgtctggtgcgtgcggcgattgagtatgcaatcgacaacgatcgtgaatcagttactctggttcacaaaggcaacattatgaaattcaccgaaggcgctttcaaagactggggttaccagttggcgcgtgaggaatttggtggtgagctgatcgacggcggcccgtgggttaagattaagaacccaaaaaatggcaaagatatcatcgttaaagacgttatcgccgatgccttcttacagcaaatcttgctgcgtccggctgaatacgatgttatcgcctgtatgaacctcaacggcgactatatttctgatgctttggctgcacaggtcggcggtattggtattgctccgggtgccaacatcggtgacgaatgcgcgctgtttgaagcgacccacggcacggcacctaagtatgctggtcaggataaagtgaacccaggttctattattctctccgcagaaatgatgctgcgtcatatgggctggactgaagccgctgatttaatcattaaaggcactgaaggcgcgattcaggccaagacagtgacttatgacttcgaacgtttgatggaaggcgctaagctgctgaaatgctcagagtttggcaacgctatcattaaacacatgtgatattgacatgtctataaaacttcacgggagcttatgcttccgtgggttttccaactacttagtatttcttctgcaaaactcctgcaaaaccctcctgcaaaactgtacaaaaaacaccctcaattaaacagctaataccagccattctttacccctatcatcattatatttatcagtcatagcctgatttttatgtccgagtaatgttttagtatccactccttgttctcgatataaccgctctgctagggatcgctgttcatggaaagtaggtggggtaccctctttccattgcaatccacttttatctctggccgccgaaaatccggtagtgattgcgttgctagatacttgaccaccacgtttagccattgatgttgtatgatgataatgaagcatgtacggactaacgatcatattgcgacaccgtgctataacatcttgcagcgtataaccgacagtctcacattttaaggttatgggtatggctattctggtgcccgttttttcctgcacgatatgaaggtgattatcccaaacatcgctaaatttcatgccagcgatgtcacctaagcgctgaccggtaaccaaagcaagaagcattgcattttggatataaccttgcatattggcagcggcattaaatattgactcccattcatcaaagttcaagcgaatacgggtaaccttgtttgctggttgcttggtggccagagcagggttatagccaggcggcacctccccagcgtgttgagcttctttgtacacatcgatcagcaccatccgaacaacctgcgccatccgtttttgccccttctccttatactcttcaatgacaaaggctatatctctagcgccaacatcaggaagggttagcattccacaatgacgtctgaacgcttcgactggtgcatttttttgcttaagtgtgttgagttttatttcctcactgtcgtaacgttctttctggatagtgagatagcgatccagccaagagttaactgttattgccttaccagttttgagactgatctcatctcgcgctttgagcaattgccccatttgttgacgggcaaaacggctattagcctcaatagcgatagcctttgctgcagcctcatcatcacctaatccatgaaatttacgggtaataggatgcttataacgccagtagacctttttagttctggcgtcggtatagcacgatagacccggtacatttatgttgtacttacgaggtctggccatcttccattatcctcttcaaccttaaatcatcatctttcttcactgccggtttgacggtcacgccgacaaatcgtgcgttcttgtccactcgccagcacctgccagctttaaacggtggcggtgagatcatgccatgttgcgcatattttagtaacgttggatagctggggatcggctcgtcaaactcctcggcggcccatacatccaaagtctgagttctagccataattagccgccttgcttatctgtagggtaaaacgtttctgaatattttgacggatagtccgccaagtagtcgcttaatgtccgtgaacaattctattcgctatcctggctggtggctgttatcaggcgctgataaatggctgatacatatcttgcctggtgcaacgcatcggccagtgcattgtgccgttcgccgtcaaaaggcatatcgcgcttgggatcaaagccgattgctcgccccagttttacgatggtgcgtacgtcgagatcattaaaccagctccaacatggtgacatctggcaacgctcatacgccgcacgcaaaataacgttgtcgaacgctgcgccattaccccagacgtgtaagtatctggtgcttgggcaatgttcagaagcaaattgatttaagttcaataaagctgctctgatcggcgttgggtcataggcaatcgctgaacgtgcctcactgctttgggttagccaccaaagaatggtgctagcatcagcgatggcaccgagggacatttcactttcgagatcgaccgcggtataaaattcagcgccaatttcgccggtagccggttcaaagaatactgcgccgatcgccactatcggggcgttaggcttgttgcccatagtttccaggtcgatcattaggtttttcatttattttccttggttgcttaaatagagaatgccatcgaccggcaggcattcatattcaggtggcaggccttgctgttgaatgtcagccaggcagtttttatcatcgggatagatatagccttgcggttcgtactggcagggctggaaggtgtagcagaccagcagaaacagtccgacactcataggctttgcccttcgccaaccagttcgttgtaacgctggataaacatggcgcgagcctgaacggagccaacgggaataatggcgatgtcttctgacggtgggatgccttcgagcatcggccagactttgccatcatctatatccagatcccggcgttcggtggccagcatgaccaggtcggcataatggacagaaaaacccatctcatcaggcagcccaaatttctcccggataaccaaatcaatctggcgttctacggcttggtaatcaggcaataagcgtttaagaggggagggaatatctttgcagtaggcttcgctggcatcatgcaacaaggcttcaagggcaaactcagcaccgataatctgactcatcagcacactgtgctgcgccacgctgtagaaatttggcaggtgaccagcaaaacggcattcatgtgataacgcctgtgcaatatcttcaatacaaatactttctgcagtcggttttgaataatcaaaacgctgaccggaaaacgttgtaatacacgtcataaatatactccacacggtttttaggtaatactccaccaaataccccatcgctgggatatttgaggttgtactaataattaatgtttatgcgttaaaattaccgataaatgtttctacttctacgccgtcaaatttcgcaattaatagatcgcgaaattcctgcgctattttttcttgctcgccttccaactgaacaatgcgcaaaaccagaaccggcacatcaccgccagtcaggatactgtagcgtaatttaaatcgacgctcgccaagcccttcgtatggcacacatttaaactcaaaggtggcaggcataatatctttgctctttgcttctacggtttccataacggaacgcttaccgctgaaatcgttgtcttcatgatcggatgaactggttgattcaatggtaatgcggcgtactgcgcctacagcttgtcggatatctaatacaacaccatcagcatcaaaggccataaggtattcgcgccagtcttccagccactcggccagctctttctggcgcttcttctgaccatcaatagccagtaactcacggaatggggcggtttttttgagagataaattggcggtgttatccgcatgaccaggttcttcaagtgtaccgaggttaaacacggtcttggcactcatatcatcggcatcgataaagcaacgcacaccattacctgcgtaaccagaggaatatttcacatactcatcaatgctgctggtttttaagttgccacggaaacggaagcgaccgttctggaatttttcgaggctgtgaacagtaacatcattgggcaaagcaatagtcaaacaatcagcagaagataatttcgcttccacttgagtcgtcattgccatattgcgaatttcttgaattgcagacgagtttaatgcttgagacatattaagtccttaatataaataataagttaaatagcaagatggatttaaattggttgcgtttaattaacggtttttaatcttccgtcagtctcgcctttaatagtgaatagctggccttggtcttcctgcataattgccagcttaccgcctttacctacatacattggtgtttcggtagtatcttcttcggacgatttaccgcgtggcgtcggggttgtaaatttcagtttatgggcaatcatgacgcgcttttcttccattgagttgctgatccgcgacagatcaaactcaacgatgactttacctttgccgccattattcagaacgcctaatgccgccgcattcaacgctgctgatattttgttttcaaaaataccggcatccaactcaccgagaaaatccggcacattggtttttctatcttcactactcatcggggtgaccctcagttacgcagtgcaacactgcagttagttactccacacacatagagaagagcaccggaacgggggctttatactgtacaggttaaaagggataacccgtccggagcacttctctgtgtgaaaagggcggctggcctaatctggtgttggcaggcgcagccgcaaaagacacagcacagcaatggaactcaaatctgtgcctggttacttctccacctcaggcggcggtggtatcctcaaagtccctacaacaaggaggatttttctgtgaacaatgaaaatataaacattcgtcttaaagctatggaacttgccattacgcgtcttgcaacttcaattactgaaaatggcgggccatcatctacagatctagaaggacacattctttattttcgagagcgtcttggtcgtggtgatttagaacctcaacaagaactgattttcaaacaaacactggcgctgcttgatccgctatcaccaaaaccaggcgacctgttttaattatccgtttcacaaaggcttttactggtgtaataaccacgcttcacggctgcttgattactcagcatcgactcagcgaggcgtatgttttggttggtttttgcattaggtttaagtttctggagttctttggagtcctcgagcaacaaacgaatcaatgcaatttcacattcattaatagcctggtatttaagcccggaaggtaggttaaatgtcctgccttcaagtttatcgctatcttttttgctgatttccatcctgattactccacactgttaaccctactaagcgaatcatccgatgtttctatgccaccggcagctactacgtgggcgtcctgctgtaagtatcccagctttagttccacacactttttgagatttccggtttctcagccatcagccgatattcttccggcgtcagattattcagggattcatgaggccgctcactgttgtattcattcagccagcgctccgttatttcccgtgcttcattcagtgttctgaacagataaaaatccagtatttcggtccggtacgttcggttaaaccgttcgataaacgcgttctgtgttggtttgccgggcttgataaattccagcatcacgccatggtcttcagcccattgtgccagcgccagtgatatcaattccggcccgttatccatccgcatcttcagcggatagccacggtttgccgctattctgtccagcacccgcacaatgcgctgcgccggaatattcaggtcaatttcgatagccagagcctcgcggttaaaatcatccacgacgttgaaggtccgaaaacgtcggccacatgtcagcgcgtcgtgcataaaatcaatcgaccagctttggttgagggcttccggcgtggccagcggcgccggattacgcaccggcaggcgttgtttccctttacgacgaaaattcagttttagcagacagtaaatccggtgtatgcgcttgtggttccaggcgtatccctgcctgcgaagcacctgaaaaagcttcttaaatccatagcggggatagcgttcagccgcctcagtcagcctctggatcaccggttcatcacgtcgtgtattcggttgataacgaaacaccgtcctgctcagcgataacgtcctgcatgcctggcgtatgctcatcgtaaactgcgtggtcagatagttgacgagctcacgctttatcgctggttttaaagctttttttcgatgacgtctttcagcgcacggcattccagactcaggtcggcaaacatctgcttcagacggcgattctcgtcttctagatctttgatttttttgatatcagcggcttccatcccgccatatttcgccttccaattgtaatagctggcttcggaaatagcagcctcgcggcacacatctttgacggtcctacccgcttcgacggacttcagtacggcgatgatctggtgctcggtaaatcggatcttgcgcataaggatctcctcaggtgacatcatcagtatgtcggaagatctctaaaagtgaatgggccgtttaagcgggatacttacactgcctgttcgctgttgatgaacgtaattaaacacctaggttgtttttgtgtcaacaactttggttgtattttgctttgttggttgtttttttgttggttttaaaatagaaatttgatgggaatgtttcaaagattttagaggtgaatcaaagaatcgctgcgaattggactgattaagagtagacgtttacgtggctccccaagtaaggggagccagagaatggtgggtgcttctactttttcttatttctgaaattatcatcattcatacagtaattgtatgaatccaagattagccctgataatcgtagaatgttctcaggacgatctattatgatttgattgccaggagccacttccagtccagctcgttcaacttctgcgatagctttttcatctagctcaattggtagaattattgttggtcgctgtttgctatcgaaataacgcacaagccaacggtttgattttccttggcaaagaatattatagtaactagctgtatcttttgccgaaatatcagcctgttcaccaagtaataattgaatattactaaaaaataatctttcgttatgcgtagtaactatatttgaattttctgggtctacgactggcgctgtttcatctgttattttcatttctggcgctagtacagtttcaatatttttgtctttgttggaagccattgatagcccagaaacgaccatcgcactgactgctcgctctactgccatttttactaatggtgtgatggtgtcgaggaatttttgatttaactgtcgttgtacgctggagcgacttgcaacataacgaacaaaatcagcatcaacatttcttaaactatcactgataacatcggtgaatgctgataagtaaatgctttcttcagccaaggttctaagtgcttctggttggaactgatcgtggcggaattgatatagctgatgtgcatcagaatcagatgcttcatccacatcaatctgtaggaatggagaggcatccataatatttctttgcttaagatcagtaaagaaacgccattgtgtgccattagttatggctgcaatggtgacttcaggtgtagcgttaaaatatctagaaagctgaggacaatggttatcaagtttttgattataacccttagcctcaatgaacattacaggaacaccatggcaaaacagagcatagtcgactcgctcacctactttaactccaggaaaatcagcaccatactcagctttaacttttgtggggtcataagagttaaaaccaagaatatctaacattggtaatattaatgcttgtttcgtagtttcttcggtagaacagtgatggctcacttttttgacatgatcagagtgcgctcttaatttctcagcgaatatcttcatattttcctttaactcttagtttgaatgacactcttaccctcattggactacttagaagtgagagctatcaataatccagaactgaccaccaaaaaacgcggccaataatttctacggtttctccatcagcatcttcgtcagggtgttctcctttattaaagctgcggatacttagtttatttcctggcatacgatataaaagtttaaggcgctttaatccgtcttgattgattgcatatattttgccatcgacaatttttttatttgcgcaatcaacagctactgtcgtgccatttggcaagatcggctccatgctatttccatgagctggaaaacaaaggacattctctttctgagcaccaactcggcgcaaagttgatttagaaaagcgaagtttgaaaccattgtagtcttgatcgcagaaactaccgtcaccagcagcaagttcaatatcacgtaggtagggcacttcaacctcgtcttcggggatcgggcatttactatcccaaggagcaatattgccccattcatgttcaggagggatattggattccttacctataagaacgttggattccttcatcggtggaacgccttctccaagccattctgggcgaacttgaagtgcacgggatatttccagtagcttagtcgtgctctggcttttaccggatgtgattttttgtatagcagcttgagaaactccagccttctcagctaatgcagcttgagttagtccagaatctttcatcgctgttttcaatctttgtgcaagtgtcatttccattctcgcgaaaatacaacctaagttatacccagtcaaaccactattgttgttgccgcaaaacaaccttagttgtatattgattgaaaaatacaaccaaggtgatttgatgaataatgtaattaaaatggcaattagaatcgttgggactcaaaagggtcttgctgaggcatgtggtgttacccaagctgccgtccaaaaatggttaagcggtaagacaaaagtggcaccaagaaatgttaaatcacttgttgaggccacaaatggtgaagttcaagcacaccaagttcgtcccgatctacctaatctatttcctcatcctgacttaaatgcgattcgcactacagaggaactatctgtaagtactgagttaaataaaaccaccaatcaggaataactattgtggataacagaaatttcccaacccctgatgacattagcgcatctatacacgctctcatcaccgcaacacccggtggttatgaacgcctggcagatgaactccatgcgggagcaagccacaacgcattgaggaatagagtccgtcaacatgcagggcaagcggtaccgattggtatggcgatcacgctggagcagattagcggtcgtactgatatcactgaagctatgtgtaaacgtgctggtggagtgttcgtcaaattgccggatgtgacccagatgggcaatgaagagctgctgattaaattcaacgagctattggctgctttgggagagtttggtcgggcgcataacgagtttacggctgatggtgttttagatcggcaggaaagtaagcggttaaaagctaaggggtacagggcgcagtcgattattgcagagattttggtggtaaccgaattgttgtggggtgacgccacagattcgcggtctgtggcgtcgggtgcattaactaaacgtgtggagtaattaacgcatgaacattgtaactgctaaacgttctatcccgcaacttcgttgcttacctgctgttgggatggagccattttgttatgtgttgagaatacccggcctttggatatgtgtcacccacagcgccgctgattatgttgtggatacattccgctatccggcactgcccgcgccaaaggtggcttgatatggctgaacaatttgaagaactggatcggcattatgtcgataagcgcggtgtacgtgttcacgttatctgtttcaaccggttaagccgtcaggttatttatcgccgtgcaggttacgagcatgaactgtgtaagccgctggcgcgtttcagaaaagaatttaagcaggtgggtgtatgagcgtaaagctatccagttatgtgtgggacggctgtgcggcggcgggaatgaagatagctaaggttgccatcatggctcgcttggctgacttctcgaacgatgaaggtgtgtgctggccatcggtgacaactatctcgcgccaaattggtgcaggtgagagcacagtacgtacagctatcggtgaattggaacgtgatggctggttgatgaagaagacacgccgagtcggcaaccgcaacgccagtaacgtctatcagttgaatgtcgtcaaacttcgggctgcggctcacgcgtcagaatatgacacctcaaaatctgatgggtcaaaatctgacgcatcaaaattcgacgggtcagaatctggcaaaaatagccgttttgacccgccagaatctgggggcgatccgttagtaaattcaaaacaagatccgtcagataaaaagactgttggccagccgccgatggccgccgacccgcagcaggttgataaattaaaaattgattacccaaaagtcctagaggcgtatcacagcattctccctgaaatgcctaacgtcgtggacatgaccgctgaccggcaaaccaagctacgcaaactctggaagaaattcgatttcaatcaggaacgctgggcggcttacctgcgctatatctctaaacattgccgttggatgctggaagaccggccaaatgcagcagctggaacaacgtggcgtcgcaagaattttgactacctgattaccgaaaaatgttacatcgctgttaaagaagagcgggctaacgatttgccaaaagtggcgcgtatcgactctgctggccgagacgaggcatttggccgcttggtttcacagcgttgtaagcctcagaacaccgttgaagaactggcgataacgactgcaaaacgtgcagggcttggtcggatgaacgaagtcatggctcgatcagcatggaaaaacatctgggcagaagcgcaaaccacggcgagtgaaaacgaattgaaggagctggcgtcatgattgattttactcaaacccagtatgttcaggatctggaagcacttaaatcgggtgaaagtcattttttaaaaaaggttggtgatcagtggcgcacccccgatgcattgttctggggtatcaatcagatgtttggcccattggttctcgatttattcagcgacggcgataacagcaagtgtcctgattactacacggcggaagataacgcgctggctcagaattgggcagaacggctgaaagagcttaacggtgctgcatttggcaacccgccgtattcccgcgctaagcaacacgaaggcgaatacattaccggcatgtctcacatcatgaatcacaccgtggccatgagagaaataggtgggcggtatgtgttcctgattaaagcggctacctctgagagctggtggccagagcatgctgatcatgttgcattcattcatgggcgagtaggttttgatttgcctctgtggttcaaacccgccgatgaaaaacaggtgcctagcggtgcattcttcgcgggtgcggttgccgtattcgataaaacgtgggcgggaccagcgataagttacattccattggaacagctgctggcaaccggcgaggcattcttagcccagatcagcagagaagctgcccgcctggtaccacaaagccagcaacaaaatattcctgaaattattccggtaccggaagccatacctcagaatattgaacataaagaggtggcagcatgacactatttcatcctgcagtaacgatgagcagccgggaaattgctgtactggtaaagagcaaacacggtgatgtaaaacggtctgctgaacgtttattttctgcgggtattttaaccgcgccgttggcgcagttcgagtttgagcataacggcaatagctattatgagtaccgtttcaataaacgtgactcacttgtgttagttgcccgcctctctcctgagttcaccgctgctgtagttgaccgctggcaggcgctggaacagaaccaaatcccccaaaccttgccagaggcattacgccttgctgccgatctggcagaagaaaaacaaaaactggtttccgaactcgccattgctgccccgaaagcagaatttgtcgatcgctatgtcaatgcgaccggctcaatggtattccgtcaggtgtgcaagctgttacaggcaaaagaaaccgacttccggttattcctgatcgaacataaaatcatgtaccgactgaccaacgggctgatcccctaccaacaccatattgaccttggtcgctttgaagtgaagaccggcaccagcaccgtcagcaatcacgcctttacccaggcacgtttcacccctaagggggttaagtggatcggcggcttgtgggctgaacatctggcggcaggagaagcggcatgagggcactgttaacgccattcatccagcgtgaattgggcgtcgtgatattcaagcccggccctgcgctgttgccttatatgtccgggcgtttgctggtggccaccgagcctgatgaattcaaaagcctgcccgccgggctactaccagtggaaaaccagcagttagccaatgatccgcgccttgctgcctttttcaggcatgaacgtgtaattagtgccgttggtgggcgaagtgcacttaaagagtgggtggagaggaaaggcgaatgccaatggcaggataagaaaggctaccacgataagaacctgaccctgttggagtatgacggcagcgccatttgtttgtgttggcactgcgatcacaaggttcgggaaaagacactaaagcaactggataccattgccgctgcaaatttgcaggcgtgggtggttgatagtgctaaccgcgccttaagtatgccgagcgagcatcagcttactttgcccgagttctgctggtggtcggtgttggccgaagtttacgacctgctgccggatgccattgctcgcgtctctctgaagatgccagccgcaaaaatagaaaccggcggtactaaagaaagtgatattacgtggtcacctgcaccggcagaaatcattgaggccaaagttaagccagtactggcgttaaaagtcgatccagagccaccagccagttttatgctgcggccaaaacgacaacgctgggaaaatcgcaagtatctacagtgggtgaaatctcagccctgttgcggttgtgggcatcaagcagacgatcctcaccacatcatcggccacgggcagggcggcatggccaccaagtcccacgacttatttactattccgctgtgtcgccagtgccacgatggattacatcgagatcagcgcgcatgggaacggcagcacggtagccagatagttctgttatttaaatttttagaccattcgattgcgatcggtgctttggcctgatggccgttatttgtggagtagtcacttatgaattcagtaaacggtgcgcggaccgcttgcagtagccaggagaaaggcgtgagagatatgcagtacaccttggaattatggggtgcatgggctgctagcgaaaatagcggggtagattggcaacccatcgctgccgggtttaaaagccttttgcctaacaccaataagtcacgtcctcagtgcagtgatgatgatgggatcatgattgatggctgcgtggcacggctgaagaagtacaaaccggaagaatatgacttagtggtgctgcactatgtctttggcatatcgctcagggcgatagccaaacggcgtaaatgttcggatgggactattaggaaagagatgcagactgcgactggatttatatcagggatactatgtgtgtttaatgcttacttttaaattttataattatgaaggatgttaaaacttatgtggaggggagcgagccagtttacacaacactctaagcagttgtgttaataggacaagaccttcaggctgaacagttgtggattgtttgcctaaatttagcgattttgaatcaactagtttatgagcataactctcaaaagaggttgttttgactcgctgctggtaaccaagagatctaaatacagagacattttgtaaacctttgacggcccattcaataactcgatgaattttatcgagattgatgcgctccttggttccgtctcttttggttatcagtagtgagttgttcataagttcctgacctaaagtactaccctaactcatttggcagctgcttccgccaaataagcctaattgggaggatgtggcgtttcctccaatttcacagcgattaatgagagagtgagtaatgttttttcttagttgctagtttcatttttttactcctaatatagaaataaaacagatggttatagtgtgttgagttttatttttgtccgctaaatacctccctacatgcaggctggtgatggatgccatatcaccaccaactattaccaaaaatgagtcgatacaaacgaagaacccaatatataaatctcaacaagtcgccagctttcttgaaaccgtgccactttggttcatctattgtgttctttgtttttttcttatcattattaggtggtcttgcatgttttctgttgagtgagccagaattttttagcggctttttcatatcctttatcctttcctgaatgggatatgaaggaagccacattaaccgtctgttgctgtgggtaagccagctttacatatatggaggtgaaatattcgaattcaaggatgaatattcataataaaatcacaaagatgggaggttgttttttgttcggctagatgtagtgtggagcattcagatgattgtttaacgctttaataaaacattagtcaaatctactggttaaaaagcgagtaaattactaacgcgtacgcaaaaatgattgtactgtgataagagttgttacgcagtcagtagcgcttatctagtcaaataaacctcgcttcggcggggttttgtgttttttgaatcccaaaaaaatgagaagccccgacaatcgagtattaattgccagggcttaattgtttgtggaatgggcggtagaggtgtgctgataacacggcctctaccattcgcctgtttggaatctcacaggcgaaccaaggcccaacgcttgtgtgcacaaagcggatctgagcctaccaaaaaacggtagaacgatctatgaaaaacactgttaatttaaacagtattaaaattgttaacgctgattccctccaatacatcaaaaccttacccgcagaaagcattgacctgatagccactgacccaccgtattaccgggttaaatcctgcaaatgggataaccagtgggaaagtgaatcggcttatttggcctggctggatgagttgctggctgagttctggcgagtgttaaagccatcgggcagtttgtacatgttttgcggatcacggttagcggcagataccgagttgttagttcgtggtcgctttaagctactgaaccatattatctgggctaaaccatccggcccgtggaaacgtcagcgtaaagagagtttacgggcgtacttccctgctactgaacgaattatcttcgccgagcactacgccgggccgtttaagcctaccagcaaaaactatgggcataaatgcactgaactgaaacgcacggtttttcgtccactaattgattactttcgatcggccagggattcattgggcgtttcggcaaaagaaatcaatgcagctaccggcaaacaaatgtccagccattggtttagcgagagtcagtggcagctgcctagtgctgaacaatacgcgctactccaacacttgtttgatcgggttgcatcggaaaagtaccagaaagggtgtttggcgaagccgcaccatgagttggttaagacatataagacgctagatcggcagtattcagaactcaaagcagaatatgaacacttacgccgcccgttcagcgtatcggttgatgttccctataccgatgtttggacatacccctcagtcccgttttacccaggcaaacatccgtgtgagaaaccggctgaactgatggagcatattatccgttccagtagccgccccggtgacgtcgtggccgatttctttctggggtcaggagcgacattaaaggccgcggttaagttgggtaggaaggggattggtgtggagctggaagaagagcggttcgagcagacaataaaggaaataacaaaattcgttgtttagcttcgattccctctatctttgctaaatttttcttatttttacggctaataaattaaatatgaaagttttcccgagtggcttcggatataaaattccttcttaattacacaagatggagtcatagattatgaaattagttagtacggttaatcatcttgcattgcaaaatcaatcttctatgaagtctgagaaccttaccccaaaggttgggatttctgatgtagcttcaagcatgaaaagtattaaaaatgtcagcttcgatagtgttcctgtaattcattatttaaataataagggggaatctagcggtaactctgaatttaaaccttcacttattgaaaaaacatatagaaaagatgtagataaagaagcaagaaataatggcttaccgtttgcagcagggcatgattttgagggggcaaaaactatttacccttatgatcacaagctagctttggaagcattccgtcagctgtaagtagtctggttatcggtattgtaagtacaggtcgcttttagcggcctttttcgttttagcccaccagccacccaatcaactccacacacacactttgaaaccgagtggctgcgctagtgggctaaattcctcaaaacaacacccgacaatgccgggaataatattccccattggggaggtggtatgagaatgcataacgagttgcacacatgggcagactggatagaactgtttaatgcctggtggcgaggtgatgttccgctcggtggtgtcctgttgtcggtggtgatggcggcattacgggtggcctataccggcggtggatggaagaaaacctttttggaggggctgacctgcggcgcattaacccttacagcggtgagtgcgctggaatacttcgatttaccgcagcaactcacactagccgttggtgggctaattggctttatcggtgttgagcaaattcgcgctttggcgctccgttttgttggcaaccgcattggcggcggtaacgatactaaacctcaggtataaaccatgaccccttatcaattcagaatggcggctaatatcagcgccgaacttgctgcgagttggattcagcctgttaccgaggcaatgacagaattcggcatcaccactccagaacagcaagccatgtttattgcgcaagtggggcatgagtcagccagtttcacgctgctggtggagtcgttcaactacagcgttaacggtttgattgctacgttcggcaagcggttatctgccggtcagacttcggcattaggccgtcagcgcggtgaaacgtcggtaccgcttaaccgtcagcaggccattgccaatctggtgtattccggccggatggggaataaaggcccggcagatggttggaaatatcgcggtcgcgggctgattcaggttaccggattagataattaccgcctgtgtggtactgcgctcaagctggatttggtcggcaatcccgatcagctgcagcttgatatgcattccgcgcgttctgctgcctggttctggcagtcccgcaattgtggccaatatgctagtgatattcagcgcgtgacgttgctgatcaacggcggttataacggtattgatgaccgcaaggcacggtttgaaatggctaagcgtgtgctgctatgacgtggctattcagtcactggcgctttgccggtgtggttgtgctggtgggcttggtgtcggtactggtgttcaacagttaccgcctctcaaatctggtcgaaaaaagagaagtggttattaagtctgtcacagcagaacgtgacgtggcgctagctagtgttcaagcaatgaaaaagcaacaacagcaagttgctgctcttgatactaaatacgttaaggaattagccgatgctaaaactgagaacgatcgccttcgcgctgacctcgctactggcactaagcggttgcagctcaacgccagctgtaagcgattgcccgaagccgcaactacccccagcagccctgatgatgccagcccccgatatgatgcagaatttgaacgcaattatctcagtctcagagagcggatcggcatcgcaaccagccagatagctggacttcaagtttatatacgtgatgtgtgtcaataatcactaaaattaattatttattcggaagttagagcaaaatccagtctactctcatgaggtttttaaataaataataaccttaaaggtgtatttaatgaaagatggactgtatcacgtaaatcccaaaagtaaccagcaggattctggtataggaattgtgactgttaaagataaaaaattaacggtgataacctgttacttagtattactcgcttcaatgaccaaggaacgtctgtttttgggaatattaaaactttccaattacaattaaaggtaaactcgacggatacttgatctcgcttagatgggcatgtgaaagatagcccacaaatgcaaattcacgccaatcgtttgtccgattttatttaaactatagcgttgaagaaaaataaagtgtagtggtaaagcttattaatggtggggagcttaactgatgtttgatgaagattttaaggataggatttcgtcgcacttaaactctaaaatagacaaagatattcaatctggccctggtttttttgctcgtaatgttatgcaggcaatgcggtatttggaagacaagcctgtagctccttcaacacgtttaatgcacatggatgagagggagttgaaaggcaaactttcaaatatttggcacattcatgtggcagaagacaatatgacaggaatgtataatttcttgaggttgaaatctgaaaaacccgagaaaaaaacaaaatgaaaaggatcttattgcaagaggagccagagaggctttgcgacaatatctgttatcaaggggtagagtgcttaaatcgcgtgaaattagagagttagctgcacagtgttctgcatgcgcagcggatacagatatggagcaatttgaaaatgaaatgcgacagtctattgatgcaatcgcgaaaaggagttttgccaaagaaaattcaatctctggagattggctactatattggaaggatgttaatggggtaaggtattatttagattctattgaacatattcttggtagtgatgttcaaaaacaaacgaatttatctaatggtcttgatgccatactttctagtatggggaaatctcgctgattgcagagatactcttggggtattgaaagaaaattatgaatataatagtcaaagattttgaaagaaatcatcatttgctttagtacatcggggttaagctttagcacatttttacatatctaagccactggcctataagccggtggcttttctatttagggatagagcatggcaactcttaaggatttatctaatcagctccagcagattaaaaagcagatcccttttgctgctgctcaggccctaaccagtgttgctcgccagattgccgccgctcagaaagtgggtatgcagcgcaatctggataatccgacccctttcaccgttaattctgttggctcgtttggtgcccgcaaagaccgattgcaggccagagtgtttgtgcgtgatattgctgccagttatctcgaaccgttcgagttcggcggtcagcacaagctcaatggtcaggcgctgcttaaccccaagaacattaagttgaataagtttgggaacttagcccgcaataaaacgcagcagctcaaggctaaagaaatgtctttgtgggggaggtgaatggcgttagtggtttctttcagcgtaagaaaggcaagaagagcaaaaaggctaagaagcgtcagaagcgctctcctaacggggtgcatagagccaggcagaagcagagagcgcctaagctactaattcagtttggtgatgctttggcagttaaaccgacgctgggatatatggaccgcgccagcgctatggcagcggcattgatgccgggtgagttgagcaaagccattcagaatgcgctagctactgccaaatgataattattcccgctcggaattttttgggtccttcctgcgacttttctaatgtacgggcattgcgcgccgcgttctgcgtctagctatgaacttttgaaatttgggtaacaggtaacaacgaggtaacagatgaatcagtcagattttgccaaacttcacgatgtcagccgcaaaacggtaacgacgtggaaggcgcgcgggtggctggttctggccggtgatgacatcgatgttgaggcttcaaacgctaacattgagcgctttcgcaaaactgttacccgaccagagaaaaaagccgcaggtaacatgcaaggtaacaaaccgggtaacaaccgcaagggtaacagactgggtaacaaatccgacggcgatccggcggagtcaccagccaaaattgtcgagaagatgattgccgagaacggcgtcgatatgaccatcgatgaagcccgcgaaatgaaagaaaactttctggcgctgcttaccaggcttgagtacgagatcaaatccgggcaggtactcccctataaagaaatgaccgaggcggtagggcaagagtattcccgtatgcgaacccggttgattgctatcgctccagaacagggtccccgcttgagggttctggcctcaaccaccgacgacgcggggtttgtgacagcactgcaagaagtggtttatgaggcaatggaggaattaagccttgataccgataacacccgaggggacagctaatttatcggcctgggataatttcaccaaagagctgtatcaacgaagaagcaatatcaaaccgcccgagccgttgtcattgagcgagtgggccaacaagtacgcggtattgtccaaagagaccagcgcgcaaactggccgctttcgttcctttgcctatcaggatggcatgatggatgcgattaccgatccccgtgttacacaggtttcggtgatgaaatcagcccgcgtcggctacaccaaaattctcgaccatgtgattggctattatctggcacatgacccctcgccaattctggtggttcagcctcgggtcgaagatgctgaggattacagtaaaaccgaaattaccccgatgctgcgcgatactccggccttaaaagcgatctcgggcgatctgaaagccaaaagcagcaatcaaactatcctgaaaaaacaatttctcaacggttcgaatctgaccctggtaggcgctaatagccctggcggtttccggcgtattacctgtcgcatcattttgttcgatgaggtggatggctaccctgtttccggtgctggggtggatggcgaccaaatagcgctgggtaccaaacgttctgaaaccttctggaaccgcaaaatagtgctgggttcgacgcccacggttaaagggatcagccgaattgaaaaagcctacgatgagagcgaccagcggaagtattacgttccttgtccgcagtgcggcgaatatcaaacgctggaatggggtggaccagatacgccttacggcatcaaatgggataaagataccgagggtaacgggctgccggataccgcctattatgtttgccgccataacggttgcgtgatccatcacaatgataaagccgggatggtgaaaggcggaaggtggctggcgacccggccatttagcggtcatgccggttttcatatctgggcgggatacagcctgttccctaatgcggcatggaaatatctggtggctgaatggttgcgggtaaaagatgacgctttaatgcgccagacctttatcaacctggtcttgggtgaaccttatgaagatcgcggcgagaaagccctgagcgaaaagaaactgattgaacgctgtgaactcttcgccgcagaagtgccggatggtgtggcggtattaaccgccggtattgatacgcaagatgaccgctttgaaattgaggtgacggggtggggcaaaaatgaagaaagctggtcagttgcttttgatgtcattgagggggatttgcaaactgacgagccttggttgcggctggacgcctatctgaaacaaatttggcggcgagctgatggcagaggttttaccattatggccgcttgcatggattccggtggtcaccatacccagaaggtgtacgagtttgccaaagagcggcttggtcggcgtatttgggcgataaaaggggaatccgcgcgtggggggaaacgctctccggtctggccgactaaaaagccttcgtcccgttcaaaatcccagttcaggccgattattttaggcgttaatgcggctaaagatgccattcgttctcgtctgcatattgatctccctgcaccgggtagcgaatcggcgggctgcatgcactttccagccgatcgggatctgcattatttcagccaattactggcggagcgttcggtagtcaaaatttcaggtgggcaacgttatcgggtctgggagcaactaccgggtcgggctaatgaggcgctggattgccgggtctacagctacgcggctttatgtggtttgctgcatttgggtttcaaactcaatcaaaccgcagacaaaattctgactcaccccgagcggttgttaccaccgccagttgaggtcgaagaaaaaaacagtctgcgcctgcccggagccattatcaaagaatcagatcctccttcacctaaacgcattgccagacggctggcataaggatttctatgttcgatgcaaacaccagcctgttggctggtgcgatgactcgcgcccaattacaggaagcattaacccgcgcgcagcaggcttatatcgagttgtcatccggcgctaaaggggtgtcgttttcttatgcacagggtgatggcactcggtcagtgacctatcaacagacagatatcagtggccttgtggggcttattcagcttttgcaggctcagttaggcatcgttaagcgtccacgcagggcgctgaggtttcgttactgatgaaaaatgaagtgaggatattggggccggatggccgcccactggcaccctcacgctcccgtgcatccatgctaaacggatcgggtggtgtgccttacgacgctgctgattcattcagcgattcaatggctaactggcaaccggcgctatggtcgccggataatgaaattaatatttatcgtgaccgggtggtttcccgcgttcgcgatatggtgcgtaacgatggctgggcgtctggcagtgttacgcgcattctggataacgctgttggggcggattttcgtccactggctaaagtggattatcgcactctggcgttgattaccggcaataaagccttcgatgccaaatgggcagatgaatatggccgcgcggtggaatcggggtggcgtacttgggcaaatgatccggggcgctatagcgatgtggagcgcaagaaaaccgtctcccagatgttgcgactggcctttcgccacaaactgacggacggcgatgcgctgtgcgtcatgcaatatcgccccgatcgtcttggtcacggacgggcgcaatatgcaaccgcgatgcaggtggttgacccagaccggttgtgtaatccgcagcagaattttgatatgccgactattcgcggtggcgtggaaatcgatgcagatggcgtgccggtggcctaccacatccgcaaggctcatatgggtgactggtggagtggtgcggcaaccatgacctgggagcgtattccccgtgaaacgccgtggggacgtccgattgttattcatgattttgacgcagagcgggcttcccaacatcggggcatcagtatttttaccccgatagtgcagcggctgaaaatgttgattaagtacgaccaggttgaactggaatcttccattctgaattccgtgtttgccgcctatatcacctcaccctatgaccctcagttagtcggtgatgcgctggataacgatgatgtcagcaagtatcaggatctgcgccgagagtttcatgatgagaagcgaatttctctgcagtccggcgcgcgtattcccattcttgcaccgggggagtccatgaccacgcttaacgcggccagacccaccagtaacttcacggcgtttgaaagcgccgctttgcgcaatgtagcggcggcactgggcatttccacccagcagttaacgcaggactggtctgatgtgaattacagttcagcccgttcagccatgctggaggcgtggaaaaccctgacccgacgacgagatgactttgccgcggggatcgcccagccggtgttgtcgtgttttatcgaagagttacatgatttaggcgaagtcccgctgcccactggtgcgccggattttctggcggcgaaagcggcgtattgccgtgcgcaatggatggggccgggtcgtggctgggtcgatccggttgccgagaagaaaggggctattctgggcatggaagccgggctatccaccctcgaaatggaggcggccgaaaacgtgggcgaagactgggaagaattgctggatcagcgccagcgtgaacgtcaggcctatatcgaacgcgatttacctatccccacctggctgcaagccgaaacctttgcacctgaccaacaacaaaaaccggaggcaccgtgaatttaccgcacttggctcagcggctgttcaataccccgctggcgctacatccgcgcaaagcggaagtggtgatggccgcgctgaccgacagattcggcctgacccgcattcagtccagtactgactggggtgacgacgatgatgaagtttttacccgcaaaggccgggataccggctatgacgtcgtggaggggattgccatcattcctattcagggcaccttggtgcagaaactggggagtttgcgcccctacagtggcatgacgggctatgacggcatccgcgcctgttttctccgggcgctggaggacaaaaccgtcaagggtatttgtctggatattgattcgcccggcggtgaagtcgcgggctgttttgatttggtcgatgaaatctatgcttctcgtgggcaaaagcctatctgggccattctgtcagagaatgcctattcggcggcttacgcgctggcgagtgccgccgaccggatcgtggtaccgcgaaccggtggtgtggggtcggtgggcgtgattgtgatgcatgtggattggtcgcagcgtatcaaagccgatggcctgcaggtcaccatcattacctacggcgatcgcaaggctgaatctaacccttacaccccattaagcgaagaggcgcagaaatccattcagtctgatgttgatgagatggggcgcttatttgtgagtaccgttgcccgcaatcgcgggatagcagaaaaaaccattcgggatacccaggccgcctgcctattggccgctgacggggtgcaactggggctggctgatgaagtggcctcaccggataccgcattccgcgatttattaaaccaagttggagaagagtaatggcgaaaattaaaggtttttctcacctgtttggccgtggtgccaaggcatctgaagaaaatgaagaggataaggaaaagtcggagaaggctaaaggccgccgcgctgaagacgatgaggatcaggacgataacgaagacgaggaaaaaaacggcaaaaaagccaaggggcgttgcgctgaaagtgatgatgacgatcaggatgaaaaagaccctgatgcagaagacgacagcgatgacgccgatgcggatgagggggaagacgatgacggcgatgatgaagacgaagaccgcaatgttaaaaaggggcgtcgggctgagcgtaagcgctgtgcacggatttttggcagcaaacatgcagcgggtcgcgtggatttagccgcttcattggcgcttcattccggcatgagttcatctgcggtaattcgcgttcttgcctcgaccgcagcggtggcacccgcagcctcaacccctcgcaagcgttctctggatgagcggatgcaggcgttggggaatgtgcaagtgggtcaggatgctgccgatgccccaagcggctcggctcaggcgctgatcagtaaaatgacgggtttgtataaccaaacggtaggtaaaaaatcatgaatgagataggacagaatagttttactcccggcgtcactcaggcggtttttgttccggatcaactggtcagtgggcctctgcaacttgtcactgataccgtcagcctttctgcgggtgttctgctacgcggtacggttttggggcaaatcacgacgactaaagcctatatccaatcggttaaaacggcgacggatggcagtcaagtaccttgcgctattttggttgataacgccgatgccacgactggtgcagttcaggctggggtttatctgatgggcgagtttaatcaacatcgggttatttttgatgacagctggacgctggccgatcttgctgtggctcttcgtccgtattctattttcctccgtgacagcctgaccgcctctaatacctaactctgtttgtctgtattgactgatgccatttctttggtagggcattgcacgtcttcattccgtccggcagcgcaggctgtcgggctattttatagagagatttcatgaatatttttgataccaatgtgctggtgcaaactgtccccaacctgaaaacctcacaaaactttttactggatcgatttttccccaatgttgtgacctctgacacagagtttgtgtctatcgatgtggatgtgggccagcgtcgaatggcgccatttgtttcgccgctggtgcagggcaagctggtagaaagtcgccgtctgcaaaccaataccttcaaaccgccttatatcaaagataagcgcgcacctgatctgcgtaagccaatccgtcgccagattggtgagcggattggtggcgagtacaccgccgccgagcgtgaaatgctaaatctgcaattcgaaatggccgatcagatcgatatggtcaaccgccgactggagtggatggccgccaatgcgctggcgtccggtaccatcaccgtcaccggtgaaggttttgacaccacggtgattgattttggtcgttctgccgcgttaaccgtcgccctcagtggtagtgacaaatggccgatggtggttgcggcaggggcaaccaacgacaagccttcgcaagatattgagttgtggcagactcaggtactgaaagactctggtgcagtcgtgaccgacctggtgtttaccacctcgtcatggcgcgcgttccgactggataccaccatcaaagacaacgccatcgtcttcccggcattaagcccgtttggcaatcagattgatgccggtgcgcgcgtgggcaaaggcgcggtgtataaaggccgttggggtcagtttgatttgtggctctataacgattggtacattgacccggttgatggggttgagaaaccgatgctgccggatggcgtggtcattatgtccggtgccgatttgatgggaacgcgcagctttgccgctattctcgatccggccttcaactatggtcccatggcctatgcgccgaaaagctggcttcaggaagatccggctcaacgtttcttgctgatgcaatcttccccgctggtgattccaagccgggtcaatgccactctctgcgcaaaggtggtgtgagatggcgaagcaaaaagatatcccggatgagtcaggggtagagatagagaaaactatccctgtggaacagctagaagggactgacactcagttagaaacacctgatggagaagatcaggaattccccggtgacacgaactctctcagcacgacggttgtggtgcttaaggggcgttcagtgaagcataacgacaagctctatctcgaaagcaataccttggttctcgatgatcttgacgatgtagtcactctgattgatgcaggttttgtcattacgttggataacttgagaaagcaagccgctgcccgcgaagcagccggtgcgccgatgattcaggttaacaatggcgttatcgtcactcaggaaggctagcgtatgggcatccactgggatcagcatcttctcgcgccactgcattcggtatttggcgatccggttgaataccggcccacacgcggtactccttacaccgtcagcggtatttttgaccgggcgtatacgcaagatattgaaccgctcgatgatggctgcaccatcaataccactaagccggttttaggcgtaagagacagtgagtttcgttcaccgcctaaacagggtgaccgggtatttattgctgtggccggtggcgtgaccatcaatacgctgttcaccgtgtcggacgttcagcccgatagtcacggcggcagtaaactgattcttaatcaggtcaaaaaaacatgaataccgcccaggtaagagaactggtggtggcggctctacaggggaataccgacgcagatcaccgtgtttattctccgcgtgactggccaaccaccgaagagatgtatccggtactgctgatccaaaccttgattgaggaaaaacagtcactgggtcgtaacgccccgcagttcaataccatcactaccgttcgtatcactggtcgcctgcaagcgtttgacagtgaactcgccgatgatggcgcggtaaaagcggagctggccttagagcggttgcgcgatcaggtcgagcgggcggtgattaatagctatgaactgacgcggaaaattcagcaattcgcgcgagtacgctccacgattgatattgattcctcgggcgaagggcatatggctcaactgctgatggaattggatattgaatattaccaaggcccggaagatttctatcctatcgatgccgagccgctggcgggtattgacgtcactattgccatgcccgatggcacaccagaaccgctggtagctatcaacctttaggagtcaattccatgattgtacaacccgtaaccggtcgatcagtacgcgatccggtgaagggcacctttttgcccgaaaccggtgcagaggttcccgacaattcattttggcgccgccggctgaatgacggtgacgtggtgcgcgttccagagccgaaagtgaaacccgcgcctgaagccacccaagtggagaaaaaaccataatgacccttccttttagccatattccgaacaacctgcggacgccgcttttcttcgccgagtttgataattctcaggcaaactcggcaaccaccatgcagcgcaccttaattatcgggcaaatgctggcaacggccacacttccacccaatgtaccggtactggtttcttctgtggccaccgtggccgggttatgcggtgcgggttcgatgttgcaggggcaaatggccgcgtatctggccaatgacaccgccggtgagatttatatcttacccttgagtgatacagaggcgatggcggcagcaaccggaaaaatcacggtcaccaccccggcatcggccatgggggtgatctcgctgtatatcgccggtattcgggtgcagattgcggtggtggccactgatgacgttgccaccattgctaaggcgctgaccgcagcaattaatgcggccacggctttacccgtgatagcgacggcggaggcgggggtgattaccttaaccgccaaaaataaaggtgctcacggcaacacgattgatgtgcgcctgaactatctgggcagtgccggtggggaaaatacgccggacagtctggcgttgacgatcaccccgatgtcgggcggtgccggtgcgccggagctggatgatgccctggctaatttgcaggatcgcacctttgatttcatcatcaatccgtacaccgatacggcgtctctgaataaactcaaagactttttatcggacagtaccggtcgttggagttacgccgaacagttgtatggtcacagctttgccgcccaatcgggcacttacggccaactgacggcagctggggaattacgtaacgatcagcatgcctccctattgggggtgaatggctcgccaacaccaagttacatctggtcagcggcttatgtcggcgcgattgcacaaagtttgcgtaacgatccggggcgtccgttgcaaacgctgagtatcgccggtgtgctggctccgccactggccagccgctttactctgaccgagcgtaataacctgctgcatagcggcatatccacggtcacggtggccgatgacggtacggtgcaagtggagaatatcattaccacctaccagaaaaacggatttggcgtagaggatgacagctatttgcagattgaaacgctgtttttgctgatgtttgttactcgctatatgcgaactcaagtgacctcgaaatttgcccgcatgaaactcgctgctgacggtacccgtttcgcccccggatcagccattatcacgcccaacgtgatccgcgccgagttgattgcccagtatcaggcgctggaatttaacggctatgtgcaggatgcgaaaggttttgccaaagggttgattgtcgaaaagagcgccagcaaccccaatcgggtcgatgtgctgtggaccggcgtcctgattaatcagttacgtatttttgctgttcttaaccaattccgcctgcaggcgtcagcataagggatcgattttatgggtgatacaagaaaccgtctggccggtaccgcctttgtcacggtagacggactgaccatcatggtggcggggcagtttaaatacagcccgtcacgggtcaagcgtgagacgttaaccggcatggatggggtacacggttataaagaaaccttcagcgccccgtttattgcctgccagatccgcgacagcgggggcacctcaatcagtgattttaacgagcagaccaacgtcagcattatctgcgaactggcgaacggcaagaccattatcggcagcggtatgtggtcggtgaacacgcaggaagtggatagtacggaagcgacagcggatattcgctgggaaggcggctcggtcacggagaactaagatgtcggaattagaacgcagtaaaacaattacgctggttaagcctattagctatgaagccaacaagactacttatgaaaccatcgaactcggtgagccggtactgattcaggttcagcagttttatgacgagcaggccaagtctggcgcactcagtgcgatgggattattaatttctctggtgtccagtgtgccgcgtgaggccattaaaaagatggctttcaccgactacaaagcctgcgaggtctacatgatgggttttttaacctactccccgccagagaacgttggttagaaacgctggccgatgtgacctattactacggttgggggccagccgatgcgtggtccctgacctacaacaggttgttatggtggtgtgagcaggctcagcggatcaacaaaataagggcagataaacaaaatgggtaacgcttttgattttgaactggtggccaacgatcaggtaacggcgactattcaccgtattgacgaggcggtaaagaaactggttccccagttggataagacccgcgatggcttaaaactgggagggcaagagtccgtcgaaggtctggatagtatcaacgataaactgcaaggaatgggacagttcgcgcgtgaaggcgtccagtttattggtgatctggtaccgccattaaaaatggtcggggaattaggtggtaaggcgttaaagtttggtggtatagccgcggccggtgggtatgttatccacggtttagccagagggctgggcgaggcggccggtaatgcatatcaactggatacggcggcaaaaaatgcgggtatgtcggttgataattttagccggatcagcggtgcgatgcagatattggggatcgatagtgattcagcccggcaatctgtagagggattatataagacgtttaatgacccattatgggcgcgtaatgatacgacacaggcattgctggctcagaacggggttaaaattgaacgactcaaagacggcacggcagatgtgtacaaaacgctggaaaacgtggcaaagatattccctaagcttgccccgcagacgcagaagacattggctgatgcattaggtctagacgaaaaccttctttcgttaatgcgcgaaggctctcaatacaaagagctgttggcaaaggcggataaattcggtttaacggttgaccctcagaccaatgcacaactcaccgagctggatcgccagttatctgaggtgagcgcagcttgggatgggttaaagcagcgagcctctaataaattctatgctgcgatattatccgatggttcagtgaaagacgggattgagggggcgaccgatgtggtatccaatggtgtagacagtatatctctttcccatttactggggtttaatcggggcgatgaggctaaccagttacgccgtggctataacgaccctgaattttataaatcattgagtgaatgggataaagtcgggttggactacggcatgatgaccgatggttatcgtaaaaagtatgagcggcattatggccctaaagatgagcaagaaaaacaaaagctagccgcccccgcaaatacgtcttacatgcttcctagtgaagatcagcagcaggcgaggttaaaacagttagagtcgcagtacaatcttcccacgactctgcttgatcgtgtctacctgaatgaatctaaccggggtaaaaacctactgtcaccgaaaggcgctcaggggccgttccagtttatgcctccaacgggcagggattacggattaaataccacagaagatcgtatggacttcaataaatcaagcgaagccgcagccaagtatctttctgatttgcttaaaatgttcgatggtgatgtcaataaggctgttgcgtcttataactggggaccgaataacgtcaaaaagcagggcttagaaaaagcacctgccgaaacgcgtcattatcttcggaagattatgccgggactacccccttatcaattgcccatcaatgatcccaatacgactggcgcacctgataaccttaattctcgcccagatccgggtaccggaattatagccaggaacccaccttctattttatcgccatcatcaaaggccagtagcagtagcctggatatcgctaatgctattgcgcaggcgatggagagcaataaaacagagatagagctgaccttgattgatagcaagaccggtggccgccaggtgatatcgggaaagggcggggccaaaatatcgacatcaatggactattgatgcaatgaaaaaatacaacctgcttcggcaggttttctgctttctgggggcaagcatgtccataattggaaatgcattatcgagtttattgggtaccagtggtgatagctggacgtggcaggatcacctgcatccggcctcatttcgcggggttccttttgcggtggtcacgggcgagggcgtttttgggcgtcggcaggcgatgcatgaatacccctaccgggacaccgcctggtcggaagatatggggcgggctacccgccgtatgaccatccgggggtttctggtgcaaagcagccagctttataacgcgccggatgtgatgacccagcgtgactccctgattgccgcctgtgaagaagcaggacccgccacgctggtgcatcctactttgggcgaaatgaccgtcagcataacggaaagcggtctcaggattaacgaaggggctgaatgtgggcgggttttcgaattcacgttaaccatcattgaaacggggttgcgcgtttttgccatcaccagttcggctgatgcggtttcctctgtcagcacatcatggttcgggctggccagcaaaaccgctactggatttattgccacggtaaaaggggaaattcgtgcggttaatcaaacgataaaaaccctgaaaaacacggcccaattttgggtgaagatggtcaatagcacggtcaatgaagcgaccaatctggggaacacgctgcgttcaacctttggcagtacccgttatggccgctttaatttcggtagcgttgggggtagtgccaatggtgcaaccggtaatcgtgttcagcaaccggatgctgccgatttctccgggctggtctcccagcgtctggcgctgacggtaacgggccgagccactatcacacaagccagcgctgcattcatcaacgcggcctcggttgaggactatgccattgccgctgagcgattggtcagcgccattatgacggatgccgtgagtgccctggatttgatccggataatggaaactctgtcatcagagaataatgacgatgtattttatgccaacagcagtgatacccgtatagcccaggcagccaatcacatgatggtcgtactctgtgccgggtcaatggtttatgccgcgtcgcagtttcagcctgaaagttatgatgaggccagtgcgctactggctcgcgtgtgtgatgtggttgatcatgccgcgctggccgctgccgataggggtcatgatgatgaataccgctcactgaacgatatgcgccagtccatcgtgaccttgctacaacaggccggggccaacttatcccgtctggaaatacagcgttttaatcgctccctgcctgcattgaatattgccaaccgactgtatcaggatgcgtcccgtagcgacggtctagtcagtatggctaatcccgtccatccggcctttatgcccacccgatttaaggcgttaagctcatgaatgacgaactgacattgagaatcggcggcaagttaatttcaggctgggatcaggtgcgggtgacccgcagcatcgagcggctgcccagtgatttcgatttgtcgttgatggatctttatcccggaagtgataaccagcaatgggttaatccgggcgatccctgtgtggtgatgctgggtcaggatgtggtggtgaccggctatatcgaccgctgggcaccgatgatcagcaaaacgcgtcatgaagtccgagccaccggtcgcagcaaatgccaggatttggtcgattgctccgctgaatggcccaataacgtgatcagtcaatccacggcattgcagatagcccagaaactggccgcgccctatggggtatcggtagcgaccgatgtcaccgatttggacattgtgccgcaatttaccctgaactggggtgaatcgtctcaggaagtcatcgaccgcattacccgctgggcggcgttgctgtactacgacctgccagacggcagtttatacctgacccgcgtcggtacccgtaaagccgccagcggcgtggcgcaggggaccaatatcgaaaaagccgcctttaactccggtatagatgagcgcttctctgactatatcggcgtttccatgtcagtcagccagttgcaggaacaggttcaggatgcgggatacggttcggtgaccctggcaagaagccgtgacccagaggcagcccggatgcgttatcgcaatcgcattattattgtcgaaagtaccatgaaggcggctcaactggcacagcggtgcattgattgggaaatgaaccgccgttacggacgttcaaaagaactgttggttaccgtggatagctggcgggacaaggacggcaaactgtgggaacccaacaccctgatcccgattgatgtaccagtttttggtttaaaggatgaactgtggttattggccgaagtgacctatctaaaagacgattacggtaccacggcgcagatggtcttgatgccgccagccgcgttcaccgttcagccttaccagttctatagcaacctgatggagatagctcactgatgaatgattcagggcaactttcccgattataccggcaagtcaagatgatgcttggggtggggcgggtgacggcttccagcgatgccggcagcgcccaaaccgtgcaataccagaccccgctggaagtccgtggcaacacgcctcgcatggcggagttcggtttttcttctgcacttcccgttggttctgatgtggtcattggttttcttggcggtgaccgttcgagcgctgtgatcattgcctctaaccatcaagcctatcgccataccggcttagttgcgggggaaacggtgatttattctcagtgggggcagtttatcaagctgacagaggcggggattattattgaggctaacaaccagccggtaacggtcaataacgctaccgaagtcaccattaatgcgaccgacagcgtgctgatgaaaacgccaatattgaaagtcaccggcgatattattgatcactgcgaaagcaattcggccaccctgaaaacgctgcgtgaggcctataacagccataagcatccggttaaaaatgtgcaagggggcagtgccaccatcaccagtgagccgcccggatcgggggtgaaatgacagatattaccaccctctggaatgttaacgaatccatcggcgactggtcgcaatccgcggggcttgggctggctgacggcgatgacctgaaaaccgccattcttatcagcctgtttactgaccggcaggcccgcgctgatgatgtgctggacgatgccgatcggcgcggttggtggggagataccgataccgagcaggccatcggctcccgcctgtggttgttacgccgccagaaactgaccacccaggttgccatcaaggcagaggattacgcccgtgaagcgctggcgtggctgatttcggatcaggttgtcagcagcatcaacgtcgccgcccaaatcatctatcccaaccgcttaaatctgatcatccgttaccagcagccgggtaaaacccagactgcggttaaattctcatgggtatgggagcaataattcatgccattcaatcgaccgacattaacggaattacgccagcgcaataagtcctatatccagtctgagttaaaaaccaccggcagtttactgcgcttctctaacctgggcgtgatcagtgatgctgatgccggtctagctcatttgcattacggttatcttgattatatcgccctgcaggccacgccatttcatgccactgacgaatacctggctggctgggccgcgctgaaagatgtgtttcaaaagccagccaatcccgcaacttgcccttccgtcttattcaccggaacggcaggccggactattgctgccggtgcggtgctgaatcgggctgatggttatcaatacatcctcgatagtgatgtaacgatagccccggcaggaacgggtaccggcagtgtaacggctattttgtccagcccattggatgatgttaccggtggcggggtggcaggcaatgcggatgcagggacgctgctgacactcgacgttgccgtagagggcatcccttctgcggcgatagcgacggtgaaaatagcgggtggggcagacattgagagtgaagatgcttttcgttcccgcatgttgctggcctaccagaatacccctcagggcggtaatgataacgactaccgattatgggcgctggcggtgccaggcgtcacccgatgctgggtggcgcggcgcttaatgggcgcggggagcgtgggcatttattttatgtgcgacgggaatgataacgggggtttcccgcaaggctccgatggcatatcgcaacgggagcaatggggagccataaaagcgaccggcgaccagctgcgcgtggctgatgctatctatcccctgcaaccgattattgcactggtttacgcctgcgcaccgacaaaaaagccgattgattttgttattgcggggatagcgggggcgggcagtgccacggttgaggctatcaacgcggccatcgatgaggtctttttcgaggaaggagagcctggcgggaaaatttactggtcatccttgctgctggcaattggcgatgtgccgggtaccagtgggtttgtccttacgtctccctcgaccaatacccaactggcgatcggcgaactgccggtgagggggagggtaacctacacatgagccgattctccgttaatgaatatacgcaggctttgcaggctctcatgcccacggggctggcgtggccacggcgaccggatggagcacaaacggcggtgctcagagcgttggctgccgcctatcagcgcagtgatgaagaggcgcaggatctgttaattgcagcattccctgccactgctacagcgttactgccggaatgggaatccacgctgggtctgcccgatttatgtgctattggtgagattgacagccttatccaacgccagcgcgccgtggtgtctaaattgttcggttcaggtggccaatcggcggcttattttatccgggtagctcaggcgctgggttataccattgaaatcacccagtaccggcaggcctgtgcgggcatgtcagtgtgcggcgatgctattaacggcgaggactggccgtttacctggctgattactgccccggaaaccacggttaatacagcccaatgcggcctgacttacagcggcgatccgctgcgaacgtggggtaataaacagctggagtgcaggcttaatgcccttaacccttctcacgccattctcaggtttggctatataaactaactcattgaataaaaataacttagcgctttcattagcgaggattttctatgcaaaaaattggcgatataccgaatacccgagcagacagtcacggtgagtttacggacggtaatgtggcgggcggagtgtctcccacgatactgccggccgaatggtttaataccatacaacgagagttaatcaatgtactggcggctggcggggtgacgcctgacaccacaaagtttaatcagctcgctacagccatttcaaaaataatcactgatggtggctttttaaaaacagccaacaacctgtccgagataaaagcagcggggcaagcagctgtcgcacaaactctcgcaaaccttggtttaaaagaagcggctaagcgagatgtcggcactgggattaatcagataccggatatgtggagttttaccagctcaatgacctcaacaggctggatgaagcgacccgatggtttaattgaacaatggggagaatcatccttttccagatcaaatgaccagtttttttatgctgacgcttttttcccaatagcgttccccaataaagttttaaatatgagtgtgacactccacggcatcaccgatatttcgataataggaaaaacgctcgctgcggatatgttagcaagaacatgggcagcgatcccactgagcaagaaaagcggggaaaacatccctacagcgcaaagagttatgtggcgcgttattggttattaagtgaggtttaaatgaattatttctacagcccagcgaataatgccgcttatccagaatcgttaaaaacggaatatcaggctgcgcaaagttggccggaggatgccgttaaaataacggacgagacttatcagacgttttttgcctgtgcttcgccagccggtaaaaccagaatagccggaaagcaaggccagccagtttgggaggatattcccgtttatgtccctaccgatgatgaattggccgcccgtgctcgccgctatcgcgatgctttcattcaagccaccgatcccatgatggtcagtgattattctattgacgacgtaccgctgacggaagagcagcgcagcgagctaatcgccactcgtttagcgttcaaacagtggccgacgctggcgagctggccgctgattgagttgccagtgattgccgggctggataaatcccgctggctactgacggaagcggtgaataatggctacgtggtgccggtgtggccgccagaatttcgttaaatctttataggccgcatcgttcgtggcctataaaaaatcactcaggctttagtggccactcgatatttggcgcagttgaaacgtcaacacgcatcagcaaaactcgatattttctccactctgtgaggtcagccttttctttttctgtcgcatctcccatatcaacagcatcctgccgccaggcaatttcagaatcagccgcctcccttaatgccttttttttctggacagcgcgatatatcaattcttcaggtgaaggcggtggtatatcaacccatactggccgtccatttaatgaccctatggtcttcctatctggtggagtagttttccagtattcattagattcctcatcagaaagtaaaacagcatcacttggccaggttttcttgttatatgtaccatcatctttccatgctgcaggtatgaatccatttaaattagcgctgtaatataccattgcatttccctcaatatccgatagcaaaaacaagtggattagctgttccaggaactgacccagaaccaaatacttgtgagaatagggtaatagaatttaagttggttgatgtcacttgaaacatttggtcgcatgaccccgtaccattccccagagtggacacgctggagaacacgcaagcagttgggaatgctatagggaacgagagtggacccatggtgctctcaccagtagaggatgggccagcaaaccattgaatgatcaatccaccaggaacatcaggtatgcgaatataatctctggtggttactgttttcggctgttgtgctgagatttgtttccattctgaccatgggcccgccccattccactcagcggtcagaccacggacaaacttcagtcctgagtacgtcgtatactcttgctggcatccataagctgattgcgtgacaagcagtgttccacttgtatttgccgggtagtgcctaccaggagttgcttgagaatcgacggattgataccaaacacccacgcttgacgtaatattaccaaaaccatttaaatctgaagtacccaaagaccctttaatagggaatccactaagatttgacagcgccaaagatggatttgcaatatccgagagattactgattttggcaagaccaccaatatttgtcagggacaaagatggatttgtaacatcagagagattactgattttagcaagagaaccaatgtcattggaggttggtttgttattgggcccgtaaaactcaacccatgatgcccatggccctgatccagtccatgcactagataatccacgaacaaatttacgaccagagtaggctgtatactcttgctggcatccataagctgattgcgtgacaagcagtgttccagatgattgaatcggataattcgccgccgaggttgccaatatgtcggtgggttggtaccacacacccgcagaggttgccctatcacccagcgcatttaaattaattgtcccaagatctcctttagatgcaaacccaccaatatttgatagggactttgaggcattagtaacatcagaaaggttggcgcttttcttcagggcatcagcagcggcggcaatgacttcgcccaaaccaaggtttgcgagatcaccggcggcaacactttctttagtcaccagccttgctgtgacacactccgattattttttcggggaaatcaacatgctgatcggctatatccgggtatcaacaaatgaccaaaacaccgaattgcaacgtaatgccttagttagtgcaaaatgcgacctgatttttgaggataaaatcagcggaaaatccaccgaccgaccgggattgaaaaaagccatgcgccatctatctaccggtgacagtctggttgtctggaagctggatcgccttgggcgcagtgtcaggcaccttattacactggtggaagatttaaagagtcggggtattcactttcgtagccttacggacagtattgatacaggaacggcgatggggcgcttcttttttcatgttatgagtgcgctggcggaaatggaaagagagttaattgtcgagcgtacctgtgccgggctggctgctgcgagagcggaagggcggataggagggcggcgtcgtattatgaccgatgaggttattgcgcgtgctagacgaatgtttgctcaaggggcaacgttgcatcaggtggcgttggttctggaagtgtcacctaagacaatttataagtatattcctgcagcggagcagggatgatgatttttctgattgatcactgttcacacccaactcaccgccatttgcccagaatttacccgcgaggctctggtcatagaaattgaccttaatatcccggtactaagggtcgtacgtgtgctgaacaggatcgtggcaaaccgcggatatccactgaaaatgcggatggataacggcccggatctgatatcactgatgctggcgcagtgtgctgaagaccatggcgtgatgctggaatttattaagccgacgcagaatgcgtttatcgaaaggtttaaccggacgtaccggacagacactggatttttatctgttcaaaacactgaatgaggcacgggagatcacagtgcgctggctgaatgaatacaacaacgagctgcctcatgaatccctgaataaccagacaccggaagaatacctgttgatggctgaaaaactggaagtctcaaaaagtgtgcgaaactaaaatgggtgtgctttcacaagtaccgacagagtccagttaattctctcttacaacattcgctacaaataaacgggaagcatatctggatttacatggagatacggtgagagctttaatacttgtaaccctgccatataaaaagttaatattcagacaggatattaactataaaattagggatatacatggctaactcaatttatttaaccttgagtggtaataaacaagggctgatttctgctggttgttcaagcgtcgattcgataggtaataagggacaggaaagccatctagataaaatattcatatacagtctttcgcattcaatgacaagggaacaaaatgcaagccaccatcctatcacaataaaaaacctattgataaatcgtcaccgttacttgcggttgccatctcagataatgaattattaactgcgacttttgattgttatcgtactagccaatcgggggctcaagaactgtactacagtatttctattactgatgcaaccatctcagatctagctgtatttcatccacatagtgtgactcatacaggttcagaacctcaggaaacaatttctttacgttataaaagcataacctggaaccatcatattgcagggacaagtggctatagtatttgggatgaacgagtttactaaatagcggactgggaaatttatgatttgtagtggataactttcccagtaactaattaaacgccgatttttcttcttgcaataatatatggtgcagcacttaaataaccaaaaactagagatgtgtactgaaggaattcgttgttacttatatctattttaaaaataggaataacatcgaaattcgaaacgtaaaagtggaataatggcgatattgacgccacagcaatagctgcaaattgactgtaattatcgttggaattggcaagttttttaattattggatataaaataaacaatactgctgttgataaggtaatatataaaaaatccatttatttaacccttgtatgatagatattggccgtatgcagtattgtaatcgcccactatctctaaaaaaatatcgccagcagtcattagtcttatccctttcttagttaaaccagtgataaggtctgcatctatatatctaaataatctctgtaggtctggttcaagtctatatccgaataggctatttaatgaaactgatatatctacagtggagtaaagtacgtctgcaccagattcatctatattgagaagttgttttgctaggccacgatacacaaatctcaccgggccgacataatcctcacgataaagaagataataaccattctcaatagtgttattaaaaccatgagctagcatcaacccgccagctggaccagtttcaattagtccaaggccagccacagtttgtaaaccgccagatacaaaacctatagcagcgattactattttcttattttcttttattttgttcttattgaattcttctataacctctctctttaaaattatagcttgttttattctgttgcttgttaatattctatcttgttcttttaatgacgcaatttcattatccaatgcagaaacagcttcaggtaatgaaaactcaccagtattagtcttcgctataatatcagaggaatatgctattacctcggagataaatttatctttggctaaactccattttatatacttattggcaacgttgttcattgtctgaagaagctcattctgcttatttgcaatgatgttatttagccggttagattctctttgcgcgctatcaccatatccagtagcccacgggtggcgttcttcaaactcctcatatgcatccatatcgtctgatccttgacttatttttagataaattcaattacattatatagttacattagcttaattgtaagccctccaaaaataattgaaattttcatatgtgaaagcggcattttgcatgcctgaataactgttcctaataccgctacacttttgcctgaccatgtttcccaccagggaatgggcttaccattttcataaagtggcgcactttgttcagtaattgccacatcgaacgacaactgtgatttctggttatcgtgtcatgtaatgcttgccataatcgctctatgtggttgacccgcggcgagtagactgtttgataaataacaataaattttggcttcttcaaccatctcagcgtttcacggcttttatggataatgtagttatctacgatcagtgtgatagtttttgcccgcctataggtacttttaagatactttaacaggctgataaataaacccgattttttactgcaacaaccgatgtagctgacttttcccgtgccacgcaccggtcagataatatttttcattttgccccggcgtgacaacgcgtttttgctggcccgccgttgccagtcggcaccgatttttggttgagatggatattcacctcatcctcgtaaaatacgggattttcggcgtacatcctgcaagcgcttctgcgatggcggccattttctcttctttatgcgggtcgcgaatacgcagcgtgggtgccgctctccgccagaccagcccggcagagggaagccagcggcgtaccgttgaagcatgtagatgacagcctgttatctcattgatttttagtgctaacagttcagtactccagcgaaatcgctgataaccaaaatctcccggcgagtgtttaatcaactgacgcaacaatgcgcaaatatgctcaaacggccagcgtcgtccgcgccctgagggcaatgatttcagacctcaaataccataaaccgtgaaccagttaatccagcgccccaatgatgaacgcacgcagcaaagcgtttttgcaacgtcgctgactttgtcaccacgatgaagcatcaacatagcggtcagtctgcgggcatgatctttgtcgcgtgtttgatgaatagttttctgtatcaggcgtctttcgtcgcggggtatcgatgctatgatcggtataactcagtccggttggtggtttgggatattcagcgattgatcagatcgcttaaatcggactgaattcctttcgagtgatctactatttggaacagctatttagactggcgctgttttcagggaggagatcacatcagccggtgggtgaaatcgagggatcagaataggcagaatgtatataacgaatccgggctgaattgcccggactaaaaattcaaagttctgaaaccagccactgatcggcttcatcaaacatttcttcaagcaggcggttaaggatggctttatcacctttgttggcattggtattgataccgttcgcctgcattggcttaaccttaacttctgccttagggaatacacgatgtattcgcttggttagttcagccaggatcagaccattagcacccggtatctcttccacatttcgcttatggtaaaccagttcaactatcatgtttccacttcgccctgtgactgtttgcatatacagtggggagttctatcgcggttgaaaagtccttctgcaaaactatctttcttcacttaataatcaatcggttataagcgccacttttaattgtgttgagcgaataaaaaaagccgataaccatctatgaatcatgtggttaccgacttttggtatgtctactgctgcgtcatatgggctggactgaagccgctgatttaatcattaaaggcactgaaggcgcgattcaggccaagacagtgacttatgacttcgaacgtttgatggaaggcgctaagctgctgaaatgctcagagtttggcaacgctatcattaaacacatgtgatattgacagtcagctaaatatgaacgggagcttgatgctcccgttgtttattgtaaaggttgcaagttttatcaaaacattatcaaaatccccataaaacaacgttcatcagactgcaatagtgatcccgtctttgcctctgtcatcatggtaacgatcggtctgtttctgtgatttgtggcccacagcaactgggtattaatcccttgcgcgctgtacagccgttcaaaaagagagcgcggcttgtgaaatgttgcaggtgttcctgatccccaactgatattggctttatcccttgctttgctaaaattgtcgtcaaagtattaccagtgacctgagcaccacgtcctgccatggatgtcgctcggaagtaatgcaccaagtactggtttattgcgtaatccctgcagcgagccaccatgtcacgcaaggatatattcagcgcctcatatcgtattgaaaggggaatggccaacttagcgtcagttttctcttggataatatctaggtggtcatcctagatatcgctaaattattatagtaataaaatcaggcgatacataaccaaaaatttctttcatcaataattgattaaccaataagttttatatcaccgaaatacactaccagaatcatataaaataattaacgggaaggcacgggaatggatatagtctaaaacatcacttaaatggccctatcaagaataggatcatgaattaataaaaaaacgatctactcaccaacagattcactattggtttgttatcatgaccctcaagttttattaaaattcatccttgtattttgttttaactacatagctgcaaggataaccactatttcatcaatataaaataatggagccagcatgaataataagttattattatttttcattataacatcaatatattctagcaatgtgaaacctcaagatattatatatgaggcggatatagaagcatcaacacaacctcaaaaaaaaacgtcaacacccatttgtttttatactaatgataatttccaaggtgaacatttctgcctaaatacatctgaaatgatagatctttacaatactgataataaacatctgaatgataagatatcttcaataaaaatacctaaaggaatgcaagccgaaatttataaaaatgataattttaatgccccttactataatgttacggaatctattgatttagcgcgactagaaaaaatcggtatggcaggtcaaattagcgcgatgaaggtatttgaagcgcaggctatttgcacgaaaaactgcgttattatagaagaaagtaaaatagaattaaaaaaaataataaaagaatattatccaaaaacagaagatgtcaataaaattttattattaaatctcgaagttaataaaaaaagcagttttggtatacagagtgttaaccaaccaaaaattataatcgtgggtagagatttgtttttttatggtgaaggaagtaagaatcctattaacatgaggttaagcgatgatacagataacctatcctttcttttaaaatttaatgatcatggtttacaatttcaatatcttgaagctaaaggaacgaaacaactcaatatcccattttggttcaatacccaattatcacctgatgacttagcaaacttatacatcagcaatggcataccggaagatggccaagatcctgctcttcagagcatcaacccgttaatactgaatagagcgatcatcgccatcaacaagcccccccaccgtgataaacgaggcgctttaggtattattggctgtttaggtaaccctctgctggcaatttataattatgtggttcaagggcgctgcaaccagctcgatagactggtgggaatcaacgagttttctcactcagatggggaagggaaaacatgggttttgaccgattcagtcacgccattacttgcgccagagcagccccccaacttaccagcagataatccccgtcaatcaatgttacaattagccagtcttaatatgcagttacatcatcaggcacttactctgccagcggtggcaaaagcctgtaaaacttccattgaagagattctatctgcccgttatccaaggcagacaggcattcgctgtggctccacattatcgaatctgctggcagattttacattgctttttggtgaaaatattattgattggaccaccgcaaatttggtccatgttatacagcaaattaatgaatatgggactacgggctatgccggatctgaccaggagacggaaaatcggttagttgaaggtgttcaacgggcaatttctactctgggaatcgaaccattaatagcaatgctgcaggaggctttcgattatgcacaattaaattacgcacgttattttatgcacagtgaaggtatcaacagtgaaaatataaataatgaaagtcgagagactacagtctcacctctagccgcacaaagcctaccactaggcgattatattttacctttagagagttatattcaccctcaagaactcccgacaccattaattagagacaataatcagtgggttcagcctgaaggtctatattttgaaattaccgtgattcccggaggagatcagcatgtcgagacgaatttaaccgaagaagtggccgaggttattaacgattggtttaaattctataatcagatgaaatatgaatcagatgaaacaagatcacctttaactgatagagatagaaccatttatgccgccaaaattaccagccatatgttagctgatcttttgcatgacaactctgccgattatcaatttgtagtggttaaactaaagggaaaaataatcagtgtattagcatcaagaaatgatgagaatggcgaggatagctacattagtgtttctataactcatccacaatatgtattaaaaccgcatgaagagggtagcgttcgaggggcaggaacggcggcggtaagagaattagcgcgctatctgaaagaaaaaggtaaaaagacacttaaatctagtgtcatttctcaaccctctgctattgtcaaaagcaagctgggattccactatcagaattctttatgataattatttattaaaatagactaaacgccaccattcattatccaatcaggtggcgtcactccatcactattttaaattaatccacgctctctaactgtggtggaaattaattgaaaaggtgagaggaattgccaaattaatacgcaggaataacaatgggaacttttgcctcattgcttgaatccgggtgagcgttctaaaagaacgctgagagtaaaatcttacaaatatcgttccgcctctttccgggggttccctttgccgttgttaccggcgagggggcggacggcgtaatgccttcttgtgtactctttgccccagtagtgtggatcacagtctaaaattaaggtcgccatcagggcatactaaagcgagttgataaactctgaaatttcactttggtaaagggatcgccgcaatgcacagagaacggcatagtatagaaaagataggctggctccgggctgcagttctcggtgctaacgatgggatcgtctctactgcaagtttgttattgggggttgcgtctgccaatgcaacacatcaaagtattcttttgactggtattgcaggtctggttgctggcgctatgtcgatggcaacgggagagtatgtctcagtgtcttctcaatcagatactgaaaaggccgccttggctgaagagcaagcagagcttgatgctgattttcaaggtgaatttcgggagctgacttcgatttatattcatcggggccttaatgtggcactagccagacaagtggctgaaaaattgatgaatcatgatgcgttaggtgcacatgcgcgtgatgaattggggatatcagaaatcactactgcccgacccttacaggcagcgtgggcttctgcagcgagtttctctgcgggggcgatattgccattactggtagcggtaatctcttcggctagctgggccattccagctattgcgctatccgcattggtttctttggctattttgggggggattgcggcgaaagcgggtggagcaccaatacgttcaggcgttatccgtattaccttctggagtgcgcttgcaatgggtgtgtcatcgggtgttggtatgttatttggttcttttattggctgagaacagaactgtgcagcgttttataaggaatatctgacgattaaaagggggattttaaatcctctaatgtttacttaatttaatagggataaattaaagtatcaacattcagagggcgagccatgaacagaaagtttgcacctggccaaattttattccattgggtcatttttattttgcttgtactcacttatgcagtaatgaaattaaaaggatttgccataagggcagtaatcctcgtgaatccatgaagagcattcattatacactaggtgtcagtgtcctgattttaatgctaattcgcacaatactaaaattgacaaataaagatcctgatatcactccaaccgcaccacactggcaaattgcagctttaaaaaccgttcatggtattttgtatcttttgtttaacagcttgccatgacttggtgttttgtctctgcattatggccatgtcgaatgttaattttctcctccgcgataccgatcgcggaggagaaaatagtattatgcagaataacttaaaagaaattcatgaacttattgccaatacgggctacttcattattggtttacacgcggcggcagcaatattttatcactctattaatgcggagtaatacgttggttagaatgttgccagaaaagcactaagttcatcaatgtgcctatcaggtcatatgggattagcggatactgctattttgtttcaggagcaacgcgcagagacgtggtgctactatcgttcatcacctcgtatacctgtctgaacgagcagacggtaatgttttgcattcttatgacatacgcggcaattcatgaaaattatttatataaaattgttaattttaagcaaaattgtcggattgctcgcattgttctacagttgaaaggagctaatgttttgaaagggaagtgggttaggctgataaatgaatgcgacccctttttattgacaggtaatttttgcgggtgattggatgattcatgcattttctgtacttgaagataaatgtaggacaatacctgcttgggtaaaatcgtttcgctatatatcatcagataagcgtgatctcagggttgatctgctgcggggcattgctctggtaatgatggttgcagcccacattgaagtgatgtcgatattgaatatctttacctgggagcgttttggcctaacaaccggcgccgaagggtttgttattctctcgggatttatgttgggtgtgatcaatcgccagcgcttaaagaaagacgttcttctcactataagctattcattatatcgacgagcagcaaaaatatatgtagttaatgttgtgattatacttagtgtttttctcttaactaaactcaatttcataaaaacttttgaagtaacccattttactgatcgcttttcagaagtaagttatacgctatatccactttacgaccagctaaaagaatcctggtttaatatggtgctctacttacagatcgggccccatcagagtcagattttgggcctgtatttctatctgttgctggtaagtcctatctttatctatttattgcagcgcggctgggtaggtgtattgctattgttatctctggctttatatatcacctaccacattaccgggatacgacttacatcggcggagtttgagtttgcttttccatttttggcttggcaatttatttatgtcttagggatgacgattggctggtacaaagaagagttgctctctttagcccgtactcaggccggattttggattttgtccgttatgatattatttacgctggtaatgatgtttattgcgcagaatcataccaacccatttatgccctatgacacaatgctccatactataagtgcgaaaaacttcaattggttctatcagaactttgctgaaaagaatgcgctgggtccactgcgcattatcaatgatttcactctactaacaacgtgttatctggtgttgagttacttttggaaaccaataaacaagatgtgcggttggttcctcataacactaggccaacattctttgtatgtttttattatccatgtgtatgtggttttattggttagtcaggtagtggattttggcctatggcaccgagcatggttgctaaatacgctggttcatctctgcgctttaatgttgttatggctatttgcaaaatatgatgttggcagaagattcattcctaactgatttgtattttttcgactcaatcttattaagaggtcagcagtgaaaaatactccatctactctagataagaatcaaattactaaactacgtaattgcattctttatgaactgaaatattctctcggggtggcactgtcaacggcatcatccagtgaaatttttagtgcgttagcattagttgtgcgacgcaaccaaactgatgattattttaacactcgagaacgacatcatcaggcaagaaaaaaacgtatttactatatttctatggagtttttaattggtcaatctttgcgaaataacctaataaatcaagggttgatggaaatagccaacgcagcgttagaatctcttggggtagattttgaagttattgtaaaaagtgaagaagatgcagcattaggtaatggaggattaggacgtctggccgcatgttttattgactcaatggcaaccttggatattgctggttctggtcacggtatcaaatacgaatatggcttgtttcaccaacaaattcaggatggacaacaagtagagaagcctgatgattggcactcgacacactcaccttggctaatagaacatcaaagtcaggccatgataattccgctttatggccgcatagttgaagtagaagaccagcagggaaattacaatccaatgtggatggattggaaaataattattggagtacctcacgactacctagtctctgggtacattaatcataccgtaaacgcgttgcggttatacagtgcttgcgcttcagattcatttgatattcatatttttaatcatggcgattatttgaaagctgttaatcaaaaaatcgcatctgaaaatatctctaaagtgctttatccctccgatgaagtgttggcagggaaggaattacgtttgacacaagagtattttctggtggcttgtacattacgcgatgtgatgcatgatttcttcttactttccaatgatattaaacagttaccagagtttgttgccattcaacttaatgatacccatccggcgctggctattgttgagctaatgagaatattggtagatgaacatactgttgattgggatatggcctgggatttgacacaacgggtttgcgcctacaccaatcatacattaatgccagaggcgttagagaagtggtcagtcaatttattcgagctgttactgcctcggcatttacaaattatctatgaaattaatcgccgtttcctactggaaatacagagatggcgccctgaacggtcggatttattagtatcaatgtctttgatcgaagagacgcctgaaaaaaaagtgcgcatggcctatcttgctattattggtagtcacaaagtgaatggggtagctaaacttcattctgaattaattaaatctaatcttgtacctgatttttattatttaatgcctgagaagttcaccaatcagacgaacggtgttacacctcgtcgctggattcagcaggctaatccccggttatcggcgtttctggattgtcacttaggcaatgaatgggttaccgatctaacactcctgagtaaacttaaatcgttagcgaaccaacgtgacattattgctgaactggctgaaataaagaaatttaataaattaaagttaagtcagataattacgcgtcagcaagggattatcatcaatccagaagctatgttcgactgccagattaaacgaattcatgaatataaacggcaattactcaacatcctctatgtgataaacctttatcacaaaattctgaacggaaaagaggttatttcgccgaaagttcatatcttttcgggcaaagcggctcctggctatgcaatggctaaattgatcatccagttgattaatcaagttgcgctgaaagtgaatagtgatcctagagtcaatgaacaacttaaagtggtttttttagaggactataaagtttcactagctgaaagtattattccagccgccgacttatcagagcagatatcaactgcgggtaccgaagcctcaggcactagtaatatgaaactggctatgaatggtgctttaactatcggaacgttagatggcgctaacattgaaatcagagatgctgttggccatgaaaatttctatgtttttggcttgtccgcagaggaaattgctgagcaaagaactagagggcgatcgtcgtatgacgagtatttatcccacccagaaattaaagaaactgttgatttactgatttcaggtatttttcatcccaataaaaacctgttttcaccgatattccatatgctggtgagtcacggtgaccactatttccatttggctgattttaacagttattgccatgcccaatatcaagtattgaccgactatagtgatacttacagttggcacagaagagcattgaatactataagtggtatgggcgagttttccagcgacaggactattcgcgggtacagcaaggatatttggggtgagggtaattttaagtgaaatattacaaaccactcatgctattacttggttggctacttttcagtccacccgtgattgcgagtgaaacaactaacacatccgctgttaaattatttaccagcccttggtctcgtcttttttctggtaatgatgacacattttcgacggcattaacctatagctcgccattggaaaaaagtctgattaatgttcctacagggagatattcttcagaagaggtatacaaggtaaatcaacgggggctttttagtatgcagtattcccccataagttacttttttgccaatatgacaattcgcgtcccattgcaaaatgccagtaaatacagtaccgattacgtttatagtttcggttatgatgattggcacccaggaactttcagtctggtctatggcaattacaacgataataatagttttttcccggcagcaggaacccagagcactcgatttgaacaaggttcatggacgttgggttataaatttaccttacctaagccggtagaatccgcattattgattaacaaaagtgatgcgctagtttgtcaggttggctacagttatgtaccacgttatttctctgacgcttcatcaagcattgaagaaaataaaagtagtttgctaggaagttgcggttataccctcctgcagcactatttcttacgtttatctgcattttactaccctgaccataagcagcaacagccgtgggattatgattatacctacagtattggctatacgtcgggttatagccccggttcctggtcaattcattatgataactataccgggactcgctacccgtggcggcagaatgccaatgcgaactttcgtagtgggacaataaatctcagttggacattacctctataaattgaaggcgtaagaatctgtgctacgcttaattacgttgttaatagttaactgagcataatgtcttttgcaagtatgaaagttcatggacgtgggcattctctctttaagatgatgcttgataaattaagtttatatgaagcttttgggtaacttatgcaaccacatccttccgctacaggtgtgacatccattcttgttgttgatgattcggcaagttatcgctttttactggttaacctactaagaaattggcaattcactgtttttgaggcagaaaatggtcaagacgctttggctatccttgatagtaattccatcaatatggtgatcagtgactgggaaatgccggttatggatgggttgaaactctgtacaactatccgaaaacaatattccgatcgctatatttatttagtattgataaccgtgcgtcaatccgtcgaggatttgatcgcgggattagatgcgggtgccgatgattttctgtcaaaaccgataaatcaaagtgagctacgcgcccgattacatgcgggtgaacgtatattaatgctagaggcaaccctcgatgctcgtaatcagaaattgtcccaagcctatgaacaaatagaaaatgacttgcaggctgcggcaaaattgcaacgtagtgttttacctgcagaaaagctaatggtgagtggttttcaagctgaatggatgtttataccatctgcttatgtttcgggtgacttgttaagttttttccaactgggtaatcaacacattggtttttatagtattgatgttgcagggcatggtgtggcggcagcgatgctctcactgtcagttgcgcgccaatttcttaatgggcgcacggtggataacttactgatttcgcccgcagataccccctctggttatctgattaccccgccacataaagttgtcaacgaacttaatcgccgtttttgtatagagaatgatgatatagccacttatttcactcttatttatggcgttattgatgttcaaaccgcgaccggagtgctttgtcaggcagggcatccgacaccttttattgtcagtagctcaagtcagattacgcccattggtgaaggcggggcaccggttggacttattgattcgatggactatcaggacacggtgttcactctggcttcgggtgatcggctctatttattcaccgacggtattattgagtgtgaaaatgctgagcaagagctttttggagaacgacggttacaagaattactggccgctagtcagcgcgacagtgtgcaaaccgtttttaggcaagtacagcaggcattgaaatgctggcatcctgcgcaaaaaaatgaccatcagagcgatattcataatggacgttctgcatttagtgatgatatttcgttgctggtaattgagcgtaataacaattcccttctcctaacagaattgtaaggaagaaataatgaattttgaaactaaaacaattgaaaatgtattagtgataacccccttgattaggcgactcgatgcatcagtttcgctgaaatttaaagaagatatacaagcaatgattgcccgaggagccaataatattttattggattttagtcgggtagatttcatcgacagtagttgtttaggtgcactggtttcgttgttgaaaaccttaaatggtaaaggtgagttggctatttgctcattgaataacaatatccacggaatgttcaagttaacccggatggataggatatttactatcggcactgatcaacccgataccatacagcagatgaatttcgtagcgccttgatttatagggagtaaatatttatgaaagccatgatccttgctgccggaaaaggaaccagagccagaccactgaccaccatattgccaaaaccaatgatcccattaattcgaaaacctattatggaatcaattattgaacatttaagaaaatatggttttaatcagttaatggtgaataccagctatctgtctgcggacattgagaattatttccgtgatggccatgcctggggagtggaaataggttactcttacgaaggtattatggagtgtaatacttttgttgataatgttttggggtctgccggtggaatgaagcacatccaaaatttctcaggtttttttgatgaaacctttgtagttgtttgtggtgatgcattaattgatgtggatttcgatgaggtattggcattccatcgagctagaaaaagtttggcaaccttggttatgcgcccagtctcggcggatcaggtaaacaaatacggtattgttgttactgatgagcagggtagagttagtaagtttcaggaaaaacctaaaaatgaagatgcattatcaaacaatgccaatactggaatctatatttttgagccggaaatattcgattatattcctgatggggttgaatatgatataggtagccagctgtttcctaaacttgctgagttaggtgttcctttctacggtattgccttgccattccaatgggttgatattggatctctacaagatttttggcatgtcaatcgcatgatccttaatcaggatttacctgattatcccatgccgggaattaaaattgcgcctcaaatatggtgtgggcttaatgtcaaagccgacttttcgaccttggatattgaagggccagtctatattggtagtagcacagaaatacaatctggcgtgacaattagagggcctacaattattggcgcggggtgtttattagagcaaggtgcggttgtcgaacaaagttttattgctgattatactcgggttgggggcattgcacatttgtatcaacagatgatttttgccgggaaagttatctctccagacggtacagcaattgatttatctgaagcgggtttacactggcttattgatgataaacggcgtaaagatattattatggcggagaagtctttatttgaagaattgctaaataaagatacgttgatatgagttatcgccactatgactcacaaggttggttaatgaaaatatgtttgcctgcatcattatctagcctgcttgttttacatgaaaagttaatacaattcattcaccccttagagattgattcgtccagcagttatgctatggaacttgcattgaatgaagcatttatcaatattgtaaagcatggtgttaattatgattccactcaaaatattactattataatgcaatatgacaatcatcaactagccgtgactttacaggataaagggaagcctatacccacagaatttttacaaaataaaagcggattatctcatatgcctgagttgttagcgccggattcgtggcctgaaaacggtatggggttgatgatgatgtttaatgctgttgatgacatcagttatacagtaaaagagggagtcaattatctatcgttgataaaaagaatagaagagaagacgtgaaaattatgtttattcataaaatgatgctcctttaaccccccggcaatgggttgatttatctcacttattttcctggattgactgaggtagtgataatggctttttatttctcttcgtttgaaaacaggaaaccaccattaccactgaaaactcattgggttactgagtttttatggcaaagtctggcggttgctgcgtttatcttgggggcaaactacatccgctggcgctggatgaattcacttaattacgatgcgctttggtattcaatccccttagtaatggccgaaacactggcttatattggttctattttatttaccataaacctatggaaagtaagagatattcctgttctccccgcacctgaaaccatcgatgactgtatagctcctgaagagaagcaagaaaatcgccagataaaagttgatttgtttattgccacctataatgaaaatgtcgaattggtgcgcttatcgattcgtgatgcactcgccgtcagctatcccttccctttagattatcgtatttatgtattagatgatggtaatcgaagcgaaatggaggctgtcgcagcagaagagggagttaattacttaagtcgggaaaataatattggatacaaagcaggtaatcttcgtcatgggctggatatgacggacggtgactttgttattatctgtgatgctgatacacgagttttccccacaatattgacgcatactttaggatattttcgcgatattgatgttgcttgggttcagactcctcagtggttttatgatttaccacagggcaagcgattacctgaatgggcaaagcaaaagctagggtcgacaggctattttgtcggtaaagggattgagaagttggttggcccgctcaccgtggggcatgatcccttttttaatgatccgcaaatgttttacgatgtcattttacgcagacgtaattgggctaatgcggctttttgctgtggtgctgcatcaattcatcgccgtgaggctattatgcaagctgcgttacgtcgctatgtagataatatagaagatgagattgagaaatatacaagtgacgtaattgataaacaaacccaggcagacttggctaaagcaatgttacctcatgtggtacaagataccgagctgatgccatataagtttcatgtttcagaagatatttatacctctatcgttttgcatggtgatcctggccgtaaatggcgatctgtcctgcacccgcaaatagaatcaaaaatgctctcaccgcaggatttattgacttggatgatccagagatttaaatatgcagctggttcaatggatattgcgttgcatgacagacttttctccagtaagaggattaagctcagcgcaatacaaaaattaatgtatgggactactttctggtcctattttgcctgtatctggaatacggtatttttgattgccccattgatttatcttttcacgggtatcccccccgtttcgacttattcatctcctttttatttgcattttttgcccttcatgattgtctctgaattagcatttatgtttggaacatgggggatatccgcatgggatgggaaatcgtcttttcttgctttattttctatgaatttacgagcattggatacagtgctccgaggagagaaaatcaagtttcatgtgacgccaaaagaacgtcaacagggcaattttttatccttggttaaacctcaactcgccattattgggctgacgttattggggttgatttggggagcgattcagatagccgaaggcaacataaaagacccctccggctttgtgatcaatatcttttgggggggctgcaaatattgcagctatgataccgattgttttagccgcgctttggcaacctgagtatgctgtgcaggaggtttcctgatgtcattcaaatataacctccttaaggcgcgcagttatctagcgatggtgatcggtattttaatcgctttctctattgtgttgtatgtcgagaaaaactctcaagatatagaagattcccgtgtccatatcagctccagtattggccgaccattagcaccgactcctcgaccactgacttccgaagaaataatttgggctaaggctgcatggcaatattttattaataatactcagccgagtggtttagttaattccgtggataaatttccatcgtctacaatgtgggataccagtagttattttatggcgatgatttcagcacaacgaattggtattattcaacaggatgaatttgatacccgaatcagcaatgcattaggtgcattggctaaattaccactatttgaaggcaagttgcctaataaagcgtataatacacagactctgtctatggttaattatattaatcagcccagtaccaaaggtataggttggtcggctattgatattagtcgaatgatggtgccattaaatatattagtttggaattatccccagcatgctgtcgaggtcaataaggttatttcgcgttggcaattggaagcgctagtggccgatgatcaattacaaggatcggtagttgatgataaaactcagatcatttccttacatcaggaagggcgtattgggtatgagcaatatgctgcacgaaccctgcaactggttggtattaatgctagtttagcccttgattacactgcacatctacaatttattaaagttgaaggaatactggtgcctgatgatgatcgtatctcgcaaaaagagggggcgaatacatttatcgtcagcgaaccctatattttgacaggtttggaactgggttttgatctttattcatccgaattagcatggcgggtttttaaagctcaggagaatcgttttcagcgtaccggtatatatacctccgtcagtgaggaccatgttgataaagcaccttactttatttatagcacactgcattatgctgatgaagattgggctgtaattacggataaaggcgagcgcgttaatcagttgcgacaattatcaactaaatcggcatttagttggtatgccctatggcgcacaccttatagtgaacagacacgaaatcaattaaatagcttgatggattcgagtaaaggttggtatagcggaatttatgaagttaataataaaataaatacttcactaaatgccaataccaatggcgtggtgttggaaagtttggcttttatcaatggcggaagactactttgtgctgcctgtactcaggtgatgcaatccgttggcgcaacagataaacaactaaagtaggaagattttatgatgggaaatcagtcatttttgataaagataagtctcattcttaaggctggctgcttaatgttgattctttcgctcatgccgtcttttaataccttagccgaattaccgggtgataaattagctgctgaaaactaccctgtgcggcacggtgagttaacgcccagagagatggcggttgcagttaatgcctggcaatattttgtccataatttacagcctacaacagggcttgttaatgcagttaataattatccttcgaccaccatgtgggacagtgcatcttatttggcagcgctggtttcagctcgcgaattagggattattaataaagaagaattcgatcatcgtatgttaccatttttgaaaacactgaataacttatcgttatttcaggggcaattaccgaataaagcgtacaacacaataactgctgaaaaagttaactatcttaataagccgggtgagataggattttccgctattgatactgggcgtatgttaatttggttgaaaattattaaagaacgttaccctgaatatgctaatagtattgataacgtggtattggattgggatttctcacatgtcatcgatgattgcggtacgttatatggcgcgatattagataaaaataatacgcctcagtatgtacaggaagggcgattgggctatgaggaatacgccgccagtggcttccaactttgggggttttcaacctgtcaggcatcgcgacctgaaccttatgatttggcaaaaatttactgcgtattagtgccttatgattcacgggacccacgcactaataaccaacataactatgtagtgactgaatcctatatcttgcatggttttgaaatgggttgggatcgcagtgatgatcgggccaataaagcaggaagctacagtcatccgtggatgaagaactttgctaatcgtgtctatcaggcacaggaaaatcgttatcgtgaaacgggaatactgacggcgcgttcagaacatcagttggataaagccccttactttgtttacgacacggttttcgccgatggttataactggaatacaatcaccgaccaaggtgtttttgtccctgaaaatgcggcagtatcattaaaagctgcgttaggcatgtgggtattgtggcattcgccctataccgacaggctatttgatgcgatagagaatgccaatgtgaaaggattgggtttcaacgaaggactttatgagaatggacatgggccgataaatgaatttacggcaaataataatggcatcatgctagaagccttgttatttaaaaaagaagggaaaatacttcgcttcaccagtggtgatcccagccacagcgactatattccgtcgctgtgggaacggcagttaattaacgggtttgacacgaataacagcaaacgaaataggccatatattgatgcaactcctagcctgaaagcattttgtgatcaatcgggcatcgcgatacgtaaagcaccaaattgtaagagctgccagtgcgctcagtgtcaagatgaaagcagcagcaataataatttatttaaattaccggcagcaacatcatgcgcaaaacagtgacgtctgccgctattgcctgggttattggtgctgggctactgggtgctgcgtttacgggcggtatgtttgtggcaagcagtattactcccaattccgttgcctattcagcccgtagtggtgtgttatcagataatgagcaattatgggcgaaagtcgcttggcgttactttgttaataatacgcaaatgggcactgggttggttaattcgttggataattacccggttgttaatttctggcaaatcggtgacacctttgttgcattaaccgccgctgctcaattaggcctcattaatcggcaggagtttgatcagcgcctttcactcttattggcaacgatcagtcaattacctttggttgaggggaaaacgccaaatttgctttataacactgtcaacgggcagatgattgattatgctcatcagccaaaaccgttggggtggtcggcacaagatatcggccgcttaatggttggtttgaaagttgttgcacgtttttatcctgaatatgccgagtatctggataaggttctattacgatggaatttttgtcagattattgatggtaacggtgagttactgaaatcgtctactgttaatggccaatttatcgccaagccagaaggcgtgttgggttacagcgaatataccgcaggcgcatttgggctgtgggggtttcctgtaggaatatcagctaatcttccttataacaccacgttcatttatggcatccccatcgatttcgatatcagagatgctcgaataacctatgtacccactattgttgtcagtttgccttatttactgacagcgatggaattaaaaaataccccaatatttaaacagcagaaaaaacggatagataatatttatcgagtacaggaaatacgctggaaaaaagaacatatattgacggcgcgtagtgattacttgacctcggttgcgccctatcacgtttacgatacggtgttcgctaacggttatcattggaatactattagcgaggacgggcaatttcaccctgatttggcattggtatccacccgtgcagtttttggcttatgggttttgtggaatagtccttataccgatgcattaatgaagttgactcaaatgcagcatgatgaaaaacgcgggtggtatgaagggcgttatgaaaataatggcgcgtataacaagacaattagtctgacgaccaatgctatggtcttggaaacgctgctctataaagtggcggggagcttaattaataccgatcctactgcgggatatctggacgtgcgtatgagtgatgctttttcacgtccgcaattatgcctgccgcaagaaagagtcatccgtcgagaggtcgcatcgaaatgaacattaattatcggtgtagaacttctattttaagtttgggatttcttttgcagcttatctcgtcggttgtggttgctcagttgccatccacgtcagatttgtccggtcagtggcgaatacgggatggcaatccgccagcttctgaagcctggcgtgacaccttggatgacagccagtggcaatatttgaaagtgcccgctaattggtatagtgagggcgtcgatcatcaaggcgtattatggtatcgcactcggtttacattaccggttttagataccgatgatatggcgactttggtattcgatggcgtcgactatcaaacggacatttggctcaacaatcaacaagcagggcgacatcagggttattttcaacgatttagcgtcgatataaccgatatggctcgaatagataatgtgctggctgtgcgtgtagatagcccttacgaaactccggggaaaatttggtcatttcataagcaactaattaagggcgtgttcaatcatcatgacacccgacccggtggagcgtggtcggatcgcggacaagatgccaattcgggcgggatttgggctccggtggcgtcacatatcagtcgtggtgccgttatagataatgtactggccgtgcctgactggtcacgggggcttgaacatccgattctaaaagtgagtttggattatcgtgccaaccgcaaccgttctgttgttatgttgctacgtttgatacctgataatttcatcggccaatcttatcaactggagaaaagtgtttcactggttgccagtcagcataatgcacaaactctcaccaccaattttcttattgataaccccgcattgtggtgggtgtcaggtcatgggaaacaaaatctttatcggctagaggtcagtttctcggatcgttttggcatgatggatgaaaaacatgttcgcaccggcttacggcaaattgcgatagacccgcaagagcaaagttggtcaatcaatggcaagcgcctattcattagagggacgaactatattggtagcccgtggttgggaagcttgacctcagccgattatcaccgtgatttagttatgatgcagcaggccaatatcaatgccataagggtacatgctcatgtggctgggcgggcgttgtacgatctggctgatgagatggggatactactctggcaagactttccgctgcaatggggatacgataattcagcctcttttgccagagaggcagccagacaggccgcagatatgacacggcaatttggcagtcacccagcgattgtattgtggtctgggcacaatgaacctccctgggatgctacctggatgcaatatcgttattcagactggcggccagacaccaaccgggcgttaaccgcgagcgttgcacaggtgctcagtcaggatcatagccgaatcactcatgcttactcatcaaccgcagaacactattggcaagggtggtactcagggcagaaaaatgatcatcttaagccggcaactacctcaataatcagcgagtttggcgcgcaagccttacctgatttggcaacgttaaaaacgataattccgcgcgctgatctgtggccaaaaacgacggataaacaagatgaaggttggcgcacctgggcataccataattttcaacctcatgagacatttgaattagctaaagtgattcgtgggccaaatatcaatacgtttatcaataacagccaacagtatcagtcaagtttgatccaactcgccgcagagagttatcgacgccaacgttatcaaccggtcgctgcattatttcactttatgttcactgaaaactggccgtcaattaattggggcgttgtggactatctccgtcatcctaaaccgggttattttgctttgcagcgagcttatcaacccgttttaccttctatagaacctaaaacagaaaattggggtcagggacagacagggcgtattgatttatgggccatcaacgataactggctcaactatcaaaaagcatcattacattggaaaatattgcaaagtggcatggttttatctgagggatcgcagaaaataaaattaatggcggatagcggtcaaaaagtgattgaattgcaagttatccctcgtgggattcagccaatgaatgtaatgagtgacattattaacgaacggggtgagatattaggccacaatgaactcgaaattcacattcaaccttaactaatactgctcattattagcagagaatacttaagttcgtctagattgtggccgacactatcttaaatagtagagtgatcctatgctttagccaatagtgattataagagtatagatattatatgaatctttctccattcagtgcccatacccagcaatcaccctcatcttggctttcatttaagttacaacaaaatattttgctgccgctgtttattttcattgttgggctggttatttcaggtgtgggagcatggtggctttataacgaaattgaagccaatgcaaaaatagattttcaacgtaatgttgacagagtttctggggaggttgagcggcgtttcaatctacctatttatggtatgaatggtgcaaaaggaacctatgcggcggacggtgatctaacccataaacaatttcatgcctatgttgcctcacgtaatttaccggtggagtttcctggtgtgaggggatttggttttattcagcgggtgcaacgcaaccagttaaattcctttattgcggatgtccgagctgacggtgcaccaaactacgctctacgtcagttgcaagataaacaacatgatgatttgtatattattagatatatagagccatcagaaggaaaccaaggtgcggaaggattagatgttggctctgagccggtacgacgagctgcggtactctcggcaatagacagtggtaaaccgaccctttcaggggctattcatcttgtccagtctaactttaaagctcccggggtactgctttttgttcctgtatatatttatggctcaaatcctaccactccagctgaaaggcgggcgtcattagtgggtgttctctattcccccatcgcaattgcagaactattaagtgatattcctgagtctatgaatgggcgagtggatgttgaactatttgatagtcttaacgatttgtctaataaaaatttgatctttgacgcggacagtagcaaatccgctgatttttcccctaccgaactgcaaagcgataaagtcctatccgcgagaatattccatagcaccaatgtattacggttgccgggtcgtgatatgacactgcgaatcagtagtacacctacgttcgaagcgcagatagagcgttatgtcccctggctgttatttgcttttggacttttgctcagttcagcattcgctttacttattcgccagcaagtcagtgggcgtaatcgggcagaaatgctggctcggaatatgactgcagatcttgaacgcttggctttagttgccaaaaatacttctaacgccgttgttattaccgatgtaaaacgtaatatcgtttgggttaacgaggggtttgaacgtattaccggatacagccaagccgaagccttcggcaagtcgccggggagattactgcaatgcaaaaatacagatcggggtgtagccagtcagatgagggtggcgttagatgccggagagccatttaagggtgaaatcgtcaactgtactaaatcagggcaagaatattgggttgagctggagatccaaccgcgttataacgataagaatgagccaatcggctttatggctattgagtcggatattagtgaacgtaaagcgacttatcaacgtcttgaagtggccttgcgtgaaaatgatgctttactcagcacccttaatttacacggcattacttctaccgcagatcgagatggaataatcacggatgttaatgacgcattttgtactattagtggttacagccgcgaagaacttatggggcagacttaccgcttagttgattctcatacgcactcgactgatttttggcaatcgatgtggaatgatattgctaatggaatctcgtggcgtggcgaaatttgtaataaagctaaagatggttctttatattgggtcgatactacgattgctccgtttaataatagttctggccaggttgagcgttatatttccattcaagttgatattaccgccaataaaaatcaacaagccaatcttattattgctaaaaatcaattagtcagagcggcagatgtcgctgagttaggtatttggacctggaacattccagaagacacgctttctttcgatgatcggatgaatgatatctatggtgtccctgaggaattacataatgctcctatcccgttggcatattggtatagcctcttgcatcaagaggatgttcccaatgttaaaagcgcgataaaagctgcattagaaaataaaagtgtctatcgtcaggttttccgtattgtggtgaaaaatcaagtccattttattcaatcaactggaacggttgaacaggatgaaaatggaaaagccttattgatgatgggaattaatcgggatattactcaacaacgtgaggccgaaaatatcctgaaaacagcaagagaagcggctgaaaaagctaataaggccaagtctgcatttttggctaatatgagtcatgaactacggaccccgatgaatgccatcctcggcatgctgacattactgcgtagaacgggacttgataggaaacaagctgattatgccgttaaaagtgaagccgccacgcgtactttactgcgattgctgaacgatattttggacttctccaaaatcgaatccggtaaaatggaactggaatgcattccttttgacattcatatcatgctgcgtgatttggcggttatcttatcgagctatctgaaggttaaaaaggttgaggtcttatttgatattgacccttcactacctcagtttgttgagggagatagtatgcgacttcaacagatattaaccaatctggggggcaatgcgctgaagtttaccgaacttggtgaggtggtgcttttcatcaaggttatagcgcaggatagccatcaagtgacgttgcattttggggtgcgcgataccggaattggcattgcgccagagaatcaggaaagtatttttagtggttttacgcaagctgaagcctcgacaacgcgccggtttggtggcacgggcttagggttagtgataagccagcgctttgttgcactgatgggggggacgctcaccttagaaagccaactgggtcaggggagtctatttcatttcactatcacgctgccgctgccttcttataccaatctggttataaataatgaaacaccagatacgttggcaagcagagcggaggcattgaatcatttacgggtcttggtcgttgatgataatccgacggcctgtaacctgatcaagcagatgggggaatcgctaaagtggagcgttgatgttgcaaccagcggtagtgatgcactgcaactgatgagacagcagcatgaaaggggtatgacttacggggcgctctttattgactggcaaatgccggggttagatggctggcagaccagtaaatgtgtgcgtgaaatgatgccagtagataacggccctattattgtcatgataaccgcccatgatcgcgaaatgttattacagcgtagcgaagaagatcaggcattactagatggttatctggttaagccgatcacggcatctatgttgttggattcagtgaacgatgcattaagtgaacgcaaacaacctgatgttgtgaaaccggcaatagccgaatctttacaccgactgtctggtataagactgttaattgttgaagataacttgaataaccaacaaatagcccgcgagttacttgaggatgagggggctgtggtcagtattgctaaccatggtaaagaggcgattgagatattagaacatcatccgtcttcatttgatctggtcttgatggatttacaaatgccggttatggatggctttaatgcgacaaagtatattcgaaaaagtattgggttaaaaaacttaccgattatagccatgacagccaatgcgatggtatctgatcgtgatgcctgccttgctgcgggcatgaatgagcatattggtaaaccctttgacttgaataatctaatacacatcgtcctaaaatacagtgggcaagctgatgttgccgccacggttagttatatgacccctcgcttgttatctgctgaattaaaaaatgttgcggcaacggcaggaattgatgttgatgttgcccttaatcgattaggaggcaatattacgctataccaaaaaatgctgtcgctgctcagtgaggatttggctaatttccccactcagttggagacattgttgactgcaggcgaccatatgtctgcatctcgtctgttacacactgtcaagggacttgccgcgcaactgggggccactgaactctctttgagcgcagggcagggagaaaagttatttagccagaatgcaatacctacagcagacacgattaatcaattactgagcgagatgagaaataaagtatccgctatacaatctgggatagtgacattaatccaaatgctatcgcaggataatgtgaggaatgtcccggcagaggtatttgatatacaacctattgagtcggaattgaatcgtttgatcttgttattacaaaactctgatatggctgcgttagaggtgatgaataaattgatgacgacttttgctgaacaacttaatggacaattatctatccttaatgatgcagtcaatcaattagactttgccaaagctatccagctatgccaaaccctaatggttaaccttcctactcggagaaataagaagacatgactataatccattctttttctcaagatttggccttaaatttaccaggggttgggaaacccaagatccttattgttgacgatcatccgataaatattcagatgctctatcaagcattttgttcggattatcatgtgtgtatggcaaccagcggtaaacaggcgctcgacgtctgtctcagtcaacatccagacttgattctgctggatgtcgaaatgcccggaatgaatggttttgaggtctgcaccagacttaaggcatcgccagacacgcaggatattcctgttatctttgtcactgcgcatattgatgaagagaccgaaacccgctgctttagtgaaggtgccgtagattttatcagtaaaccgattaacagaaacaccgttcgggcgagagtgaaaacacacttattgcttaaagctcaatctgacttattacgccaactcgtctatttagatggattaaccgaagtacataaccggcgttactttgataaacagttagaagtggagtggaaactatcaaatcgtaaccagactccacttggcatgattatgattgatgttgattttttcaaaaaatataatgacttatatgggcatcaggccggggacgattgtttgcggagggttgcaaaggttatccgagatacactcagacgccctgctgatctggtggcccgttatggcggcgaagaattcatctgtttgctccccgacaccgagttagttggagcaatggatgttgcggaaactatcagactgcatattcttgagcaaaaaatcccacattctggctccactgtttacccgtttgtcagtgttagtttgggggtctgttgtaaagaaacccatagtgtagattcaccctcgagtcttttgctcaaggctgataaacaactgtatctggcaaagaatagcggtagaaataaggtgagtggtcagtgtgttatctgagtgaggtataaggggctttttatcaacaaagataggattcgcgctcttcagtttagcgtggagcggttttagtgcgcatggcagatgaaacgagacatgcaccgctatcaattatgctgcggtatttattgaagattcaggcttgacgctttcaatatggatactgggaatataagtaaaagatctgcctaatgtcaccgtccaataaaccctaccaaactaaagccaatcagtgatcgaatcctgcaatctgttacagccttaagaattacaggtataatcctagaaattattcaactggtttagaaacgaagatgacaaaactcaccttacaagagcagatgctcaaagctggattagtaaccagcaaaaaaatggccaaagtccaaaaaatggctaaaaaatctcgggtgcaggctcgtgaggcaagagaggctgtggaagaaaataaaaaggcacagcttgagcgcgataaacaactaagcgaacaacagaaacaagcggctttatctaaagaacataaagctcaagtgaaacagcttattgaaatgaatagaatcaatatctcaaaaggtaatattgattttaacttcacagataataatttaattaaaaaaatagctgtggataagcttactcaatctcagttgatcagtggtcgcctggctattgctcgtttggctgctgataacagtgatgagagagagtatgcaattattcctgcgagcgtagccgataaaattgcgcagcgagatgcgagcagtattgtattaaatagcgcgcttagtcaggaagaacaagacgaagaagatccctatgctgattttaaagtcccagacgatttgatgtggtaattaacgctttgccgatcccgatatatgaaaagtcctaacgggcttttcattaagttttcatgtccaatccgttcagcgaaaaacgccaatgccgcgtatgattttcactgttcgcgatagatatcaggtttacagtcaacactatctgattaatcactctcatttccactttaatgccatactccgtgccttcgcggcagcatcatgagagatattttcgctatcagaacgggctagtatgacgggctttgatcaactcttggctgatgggatgaacaaaatgcaactcacttgcgtgcagcatcagccgcgctgtctgttcggtgccgggtaaccgaaggccgccatacaggtcacagcccaaaatggggtggcccaactgctgacagtgaatgcggagctgatgagttcgcccggtttccggtattagccgtactcgcgtcaatggcagtaacctcccatcttccagctcgcgataaaagcgctcaacgacccgataatgggaacgagcaggtttgccgcggattgaacaaatcgacatcaacggaaacagcgccgcatctttggcaatcgccgcgtctatcaccccttcatcgttgtccagatgcccgcaaagcagcgcgctataaactttggtcactgtacgtcggctaaactgctggcagagcgcggcattgatagccttattgcgggcaataaccatcagcccggaagtaccgaaatcaaggcgatgaaccagtgtacagccagggaatatttgtaccagccgatggtgtaccgagtcgagattttgcgggtttttccccgagagactgagcagtccggagggtttattgataagcacgaggtgatcgtcctgatagagattttcgatcttgtcatggcacggcggggcaataaaggtatcgataatcttagacatcaggtgactcggatagattgtgtgagcggatgataacacgctagttttaacggatcgttgctatcagcgatagtctttgataattgcatcgacatcgatgctcagtatggcgctaaaaacgttatcccatattgatcggattggatgaaaaggcgcctgtcacaaataaaatatctgagcatccggtcagcgtaggcggtattgctcggtatagcatcgctgttttgtccgtgccctcaaattggctggccgaggttaaagctatgttctcgaggacctgccatcttgcggataaggtaagctttttttcagcgtttgattcctcgatacccctcaaactggggagtctgctgttatgataaaaaagtcgtaatattgactaatcttattgcgagtgatggtcggatttgtatgatggagaatatcgggccaggcaagtaagtgagttggcaaccaaactttggttgccattttctgttcagtaagggacacccgtgcggtcatcgtataatggctattacctcagccttccaagctgatgatgcgggttcgattcccgctgaccgctccaaattttagatacaactgaggaaacgatgaaaaaatcactggctacgttggttttatcattgggttttgttgccgcatatgctggcgcgtcaacaactaaaaatcggctgcaatcgccgacgccaggtgttgtatgcgacacatacgtttgtgccgatggcaaaaatggcatatcagtgccgctgacagagcggtatttaggtaagaagaaaagtcagcgtttagcctctcagggggatttcgatcgcacgcaatttacctttgtaaatggcatattctgtgacgtgaaagaaagattatgccgtaaagatcgttattacggtattgacggaaaacacagtggcgccattgacacacagacaactgaatggttgttcggccagaaaaaatagcgcgaatttcgtattcctcgtggtgcttaacactccaaatcgcaaggctcacttcggcggcggtatttttaaacgatgccgatgaaggccgcgagcattcccatggggctttgcccgtagaaggttcatgttgaatctcaattcgtccaaccgccatcggaataaatggcggttggcgagggggagttaaaacgagattacttcactttggttatttgtttgacatctaactcaacggagttccagtctttatctattttcccttgcaattctacggtatctttcggggtcaccgtcaggccataccaacgcttatgatcgatatctacggtcatggtgccagttgcatcgcggaacaggtaatgatcgctgccaatacgctgctcgatgttcccgcgcagtgtcatccaagagtcatcccgcatggttttattgcttatctggttggtaacgcgtgagctcgcttcgctgcgccgattagcaacccgcctgagccagcgccagcctgacgatgaaacgccgctgccgttgactgcgattccaagtgaagtcaaaccgctggtgacggcgctaaacagcctatttgcccgaacgggtaatatgctggtgcgcgaacgtcgtttcacatcggatgctgcccatgagctgcgtagtccgttggccgcacttaaggtacaaactgaggtcgttcagctggcacaagatgataccgagatacgaaatcgcgctttagccaatctgacaaaaggcatcgatcgcgccacacgcctagtggatcagttacttacactatcgaggctggattcattatcggggttagatgatgtgcaagacattgccatgcaggatatcttgcaaactgccgtgatggatcattatcacactgctcaggcaaatggcgtggaactcatactggatattcgtcagccaccgtcacagcgtcgcggtcagcccttattattggcattattgatacgtaatttgctagataatgctattcgctatagtccgcgtggcaccacggtcaagatcacgttagatgcacagggatttagcgtcgaagacaatggctcaggcgttagccccgaatttttacaacgcatcggggaacgctttttccgaccgccggggcaagagacatccggcagtggattaggcttatccatcgtacagcgcattgcggtattgcatggaatgaccacgagttttagcgctgggaagaacggtggatttcggggcgaggtgagctggtggtagatttttgctatttcgttatttcaactatcataattggtgcagctggatacatataacactaacaaatattctgggtcaatgtagaagggagcagattgttagataactttacgtatatctttcttctattaatagattactgccaatagcattgaaatcaatcagaatgtgtatcggcgcgcgatgatattttatgtttggtaaataaatataagggattagttaaatatttatatcacttatatttaactaatcccttagatggaaataattatagaaatcactctgtttaatatttgtttataaaatatgctttttgaatctgatatgtttattcggcaaatttgataaggaggttattatgtctggatttgtggatttcaaactggttcattcaggagcgccagttacaattagtaaaacggctattctatatgtcgaggaaaacactcgcgaggctaatgtcaccaacttacattgtgttggtagtatcacccatgttgttagcgcaacatacgctgaagttcgcaagaaactacccaaatttatcgaaacaaaacgcagtgacaatggaacgccaaaagtggcattacacgactggaatgtttcatatatagagaaaagcagcagcggtactgcaatagtctattttacagagcaaggacttagtgttcctgtagcagagccgtatgagaatattattaaaattttccatgcgatataatattaaataacctgagcaaggtggggtaaagcccccactaaccctgaacttatcttggttaataacggttaaatcatgcatacattgatgatttactttcattagtgtatgcatggctaccaatgatacctcataggtagcctggctcttaaactgtgagttattactcgttaaactaagggcagcgaaggcgtttatgatgtactgatgtttttattcaaggtacttcgcttaaataagcgctggaggagggaggaaatcgttctaagaagtttgtaggtagtgctattgtgactagtatagtgaactaagattttctttttattattaattctgtaaaacttacctcgtgaagattgtaactctaaatcgtcgcttattatagcggttttcttttttaatcggctaaatagctggtggatgttattgttactaatggttgtctctttttctggccagattgaggaaagtaagacgtctcgatctattttttcaccgtttattgcgttttttatcaaaaccataaataaacaaaattctttatttgtcaattccacactacctttccagctgtaaaccactttgtcgtcaattgccacaaaatatatcatcgtcgctccataatgaaaaaagtcacatgcaaatatatcgcagtcagaatggttttgtaagatcactttcaatttcaaactaattatattgattagcctcatatttttattaaaaaataaccaaaccgcttaacattataatttctatttatgatgtttttttacttatacggttaatggtattggcttacattcattaaatcaggtcattatgaactgtagcccaatggaggaaggctaaggtaagtgattatattgtttaagtttcaataaatacaaagccaactggattttcatgatgtaagttacctgaggtattcttacgttcaactcacattcaattttaaccgtggaataataagtcacttttctattatatgcttataaataacttacagattaattttaatggttaacttgttgactatattagttacattaaataaaaattcactattaagtatcagtagtgagcagtttgattttaaaataacatccattgattaatccatgtctgtacaactgagttgcgccggcaaataagatgacgataagaagtaaacagatagatttagttggcgtaataatactatttgttgtgtcaattttcttggttcctgactaaaacattaaggtttctcagttaagctatatacgataaatattggcatctttctattgcaggatgatttctagtgctaagcattatagccaggagtaaaggaaataacgctttaacgataccaccattaatttaaaaaatggagtctgaaatggaaaaagaagaaaaaagcaatctcatctacgataaagatcctggatatgtgtgggacaataaaaatgaatgcgaaggagcagcagaagagacctatcaagaactcaattatgaaccctctatatcggcagataaactcacctggaccccaacccgattggcgaaaaccgtatttaatacttatgaggatgatgacgattttaacgtactttgttatttcaccgattggtcacaatatgaccccagaataatcaacaaggagattcgtgatactggtgggagaagcgcagatatattacgacttaacacaccggatggtcgaccctttaagcggctgatctatagctttggtggattaatcggtgacaaaaaatactcagctgatggaaatgccagtattgcagttaggctgggcgtagcaactgatcccgatgatgcgatcgccaaccataaaggaaagacgattcccgtcgatcccgatggtgcagtgcttgcaagcataaactgtggatttacaaaatgggaggcaggggacgccaacgaacgttataaccaggagaaggccaaaggactattgggtggtttcagattgcttcatgaagcggataaagaactggaattttccctcagtattggcggttggtcaatgagcggcttatttagcgaaattgccaaggatgagatattacgtaccaatttcgttgaaggtatcaaggatttctttcaacgatttccgatgttcagtcatctggatattgactgggagtatccaggttctattggggccggtaacccaaatagtcccgatgatggtgctaattttgctattttgattcaacagattactgacgcaaaaatctcgaatttaaaggggattagcattgcgtcttctgcggatccggcaaaaattgatgcagcaaatattccggcgctaatggacgcgggtgtgaccggtattaacctgatgacctatgatttcttcactttaggtgatggtaaattatctcatcatactaatatttatcgggatcctagtgacgtctattcgaagtattcaattgatgatgcagtgactcatttaattgatgagaaaaaggttgatcctaaagccatttttattggctatgcgggctacacgcgaaatgcaaaaaatgccacgataacaacaagtataccgtcagaagaagccttaaagggcacctatactgatgctaaccaaacgctaggcagctttgagtattctgtcctcgagtggacagatattatttgccactatatggactttgaaaaaggggaaggacgcaacggctataagcttgtacacgataaagtagcgaaagcggattatctctacagtgaagcaactaaggtgtttatttctctggatacgccacgctcggttagagataaaggaagatatgtaaaagataaaggtctgggcggattatttatatggtcaggcgatcaggataacggaatattgaccaatgccgcgcatgaagggttgaagcgacgaatcaaaaataaggtgattgacatgacgccattttatcttgattccgatgaagaattacctacctacacagaaccggctgagccacagtgcgaagcatgtaatatcaaataaatagcctcagataattaatactattaacgaatcatgaaatgattcgtaatggcctgttacattcaaaacaagatggaataatgaaatggataaatataataattattctaatgtaataaaaaacaaatcgagtatttctcctttgctcgctgctgcagcaaaaattgaaccagaaataacagtactatcaagtgcatctaaaagtaaccgttctcaatatagccagtctttggcagacactttattagggttaggttatcgctctatttttgatattgctaaggtttccagacagcgctttattaaacggcatgatgagtctttattgggaaatggggccgttatttttgataaggccgttagcatggctaatcaggtcttacaaaaatatcgcaagaatcggcttgaaaagagtaatagcccattagtgccgcaaacgtcttcatcgactgatgcatctagcgaatcgcagacgaacaagctacctgaatacaatcaactattccctgaaccttgggataacttctgtcgcccgggcgctattgaagcattggatagcccagcaagttatttattggatctgtataagtttattcaaagcgtagagttggatggttcaaatcaggcaagaaagttagaaacgcgtcgtgccgatattcctaagttatctttggacaatgatgcactgtataaagaagttactgcgttatcaattgtcaatgatgtactgtcaggcagcgccagggaatatattgaccagtcaggtcaggcagataaagcggttaatcaaatcctaggggatacgcattttccctttacactaccttatagcttgcccacccaacagataaataaaggactcggcgctagtaatattgaactaggaacggtaattcaacgtgttgaccctcagttctcctggaatacgactcaagaaaaatataatcaggttttattggcatatacccaattaagcagtgaacaaattgctttgctgagtttgcctgatgtgtttacccaaaattttttaacccagactgaactctccgccggctatttaagcgccagtaccacggaaatcttggcggaaaaagatctttctcgccacggctatattgtaaaagctgcggacaatataaaggggcctactcagttagttgagcatagtgacgcctcttatgacgtaattgagttgacatgtaccaatcaggctaaagaaactattaccgttaaattacgcggtgagaatattattacttatcagcgtaccaaagcgcgtatggtgccttttgataattcttccccttttagtcgacaattgaaactgacttttgttgctgaagataatccttccctaggcaacctagacaaaggcccatatttcgccaatatggatatttatgccgccgaatgggtgagggaaaatgtcagtagcgaaacaatggtaagccgacctttcctaaccatgacttaccgtatcgctattgctaaagcaggggcttcgttggaggaattgcagcctgaagctgacgcgttcttcatcaataattttggcttgagcgcagaagacagcagccagttagtcaaactcgttgcttttggcgatcaaaccggttccaaagctgaagagattgaaagtttattgagctgtggagaaaacttacctattgtttcacctaatgtcatctttgctaatcctatttttggcagttatttcaacgatgagcctttcccggctccttaccacttcggtggcgtttatattaatgcccatcaacgaaatgcaatgacgattataagggcggagggcggaagagaaattcagtcactctctaacttccgactggagcggttaaatcgtttcattcgcttacagcgctggctggatttgccctcccatcaacttgacctgctattaacatcggtaatgcaggcagatgctgataattcgcaacaggaaattactgagcctgtgctaaagtctctcggtttattcaggcacttaaatttacagtataaaatcacgccggaaatattttcgtcttggttatatcaattaacgccttttgccgttagcggtgaaatcgcattctttgatcgcatatttaatcgtgaacagctatttgatcaaccctttattttagatggtggtagctttacctatctggatgctaaaggctcagatgctaaatcggtgaaacaattatgtgctggtttgaatatatctgcggtcactttccagtttattgctccgttggtacaaagtgcattagggttggaagctgggacgttggttcgcagttttgaggttgtgtctagcctttatcgcctggtcagtattccgcagacattcggtttatcgacggaagacggattaattttaatgaatatcctgaccgatgagatgggatatctggcgaaacaacctgcctttgacgataaacaaacgcaggataaagacttccttagtatcattttgaaaatggaagccttaagtgcttggctaacaaagaacaacttaacgccggccagcctggcattacttttaggtgttacccgattagcggtggtgccgaccaataatatggtgacgttctttaaaggtattgcgaacggtttatcagagaatgtgtgcctgacaacggatgatttccagcgccaagagttagaaggagctgattggtggacacttctatcaacgaatcaagtcattgatgatatgggactcgtgcttgatattcatccagtctggggtaagtcggatgaagaaatgctcatggaaaaaatacaaagtattggtgtaagcaacgacaacaatacgctgagtattatcgtgcaaattttgattcaagccaaaaacgctcaagagaatctgttatcgcaaaccatttctgctgagtatggagtagagcgcagtgtggtgccgcttcaattacgttggttaggtagtaatgtttatagcgttttgaatcaggtattaaataatacgcctactgatatatctagtatagttccgaagttgagtgaattgacttatagcttattaatttatactcagttgataaattcgttaaaactcaataaagaatttatattcctgcgtctgacgcaaccaaactggcttggtttaacacagcccaaattatcaactcaattatccctacctgaaatatatctcattacctgttatcaggactgggtggttaatgcaaataaaaatgaagacagcattcatgaataccttgaatttgcaaatattaagaaaactgaagctgaaaaaactctcgttgataatagtgaaaaatgtgcagaactgttggcggaaatattagcctgggatgccggtgaaatattaaaagcggcctctctacttggattaaatccacctcaggcgacgaatgttttcgaaatcgattggattagacgactacagacattatccgagaaaacgatgatttcaaccgagtatttatggcaaatgggcgatttaacggagaattctgagttttctctgaaggaaggcgttggtgaagcagttatggccgcgttaaaggcacaaggagatagcgataatgtctaattctattgaagcgaaactacaggaagatctacgcgatgccttggtggattattatctgggacaaattgttcctaatagtaaagatttcaccaatctgaggagcaccattaagaacgttgatgatttatatgatcatttgttactggatacgcaagtgtcggctaaggtcattacttcacgtttatctctggtgacgcagtcggtacagcaatatatcaatcgaattgcacttaatcttgagcctggtttgtctattaaccagcaggaagccactgactgggaagagtttgccaaccgttatgggtattgggccgctaaccagcaactaagaatgttcccggagatttatgttgatcctactttacgtctgactaagacagagttcttctttcaattagaaagtgccttgaaccaagggaaattaaccgatgatgtcgcgcaaaaagccgtattaggttatctgaataattttgaagaagtcagtaatctggaaattattgctggttatcaggacggcatcgatattgagaacgataaaacctatttcgttgcccgaacccgaatgcaaccctaccgttatttctggcgatctctggatgccagtcagcgtaatgctaattcccaagagttgtatccaacggcatggagtgaatggaaggcgatatccgtaccattggaaaacgttgctaacgggattgttcggccgattatgatggataaccgcctttatattagttggtttgaggtggcggaagaaaaggagacggatagcgacggcaatattattgtatcgggacgttatcgcactaaaattcgtctggctcacttaggatttgacggtgtttggagttcgggaacaacgttaagagaagaagtgctggctgaccagatggaagaaatgatcgcggtggtcgatcgcatggaagatgagcctcgtctagcactggttgcatttaaagaaatgagtgaaagttgggacgtcgtatttagctatatctgcgatagtatgctgattgaatccagtaatttaccgactaccactcatccgccaaaaccaggagacggtgataaaggattgtctgatctggatgattacggtgctaatctggtttggttctatttacatgagactgccaatggaggcaaagcggagtacaagcagttaattctctatccggttattattaaccgggattggccaattgaattggataaaactcatcagggagactttggcactgtcgatgatttcacgctgaattctaattatactggcgatgaattaagcctgtatttgcaatcttcgtccacctataaatatgacttttctaaaagtaaaaatattatttatggcatctggaaggaagatgcaaataataatcgctgctggcttaactataaacttttaacgccagaagattacgagccgcaaattaatgctacgttggtaatgtgtgacaaaggtgacgtcaatatcattactggattcagtttgcctaatggcggtgttgatgcaggcggaaaaataaaagttactcttcgggttggtaaaaaactccgggataaattccagattaaacaatttagccaaactcagtatttgcagttccctgaggcgtccagtgctgacgtttggtatatcggaaagcagattaggttaaatacgctgtttgctaaagaacttataggtaaggcaagccgaagtctggatttggttttaagttgggaaacgcagaatagtcgtttagaagaagctattttaggtggcgcggctgaacttatcgatttagatggcgcaaacggcatttatttctgggagctatttttccatatgccatttatggtgtcctggcgctttaatgtggaacagcggtatgaagatgcgaaccgttgggttaaatatttgtttaatccgtttgagtgtgaagatgaaccggcattattgctaggcaaaccgccgtattggaatagtcgtccgttagtggatgaaccatttaagggttatagcttaacgcaacctagcgatcccgatgccattgctgccagcgatcctattcattaccgtaaagcggtctttaatttcctgaccaagaatattattgatcaaggcgatatggaatatcgcaaattgcagccgtcggccagaacgctggcgcgtctgagttattcaacggccagttcattattagggcgtcgtcctgacgtgcagctgactagtttctggcaaccgctcactcttgaggatgcgtcctataaaacggacagtgaaattcgtgctattgaaatgcaaagtcagccattaacatttgagcctgtcgtgcatgaccaaaccatgagcgccgtggataatgatatctttatgtatccaatgaataacgaattgaggggtttgtgggatcggattgaaaaccgtatttacaatttgcgccataacctgacgttggatggaaaagaaatcaatatggatctttatgattcaagtatttctccacgtggtttgatgaagcaacgttatcagcgggtcgttaccgctagaaacgccagtaagatgaacttcaaagtccctaactatcgttttgagccgatgttaaaccggtcaaaatcgggtgttgagactcttattcaattcggcagtactttattgagcctgttagaacgcaaagatagtttgagttttgacgcttaccaaatgattcagagtggcgacctttatcgcttctcgattgatttgcagcagcaggatattgatattaataaagccagtctggaagcattacaggtaagcaaacagtctgctcaggatcgttatgatcactttaaagaactgtatgacgagaatatctcttcgacggaacaaaaagttattgagttacagtcacaggctgccaattcgttgttgatggctcagggaatgagaacggctgccgccgctttagatgtgattccgaatatctatggtttggccgttggtggctctcactggggcgcaccgctgaatgctgcggctgaaattattatgattaagtatcaggcggacagcagtaaatctgaaagcttgagtgtttctgaatcctatcgtcgtcgccgtcaggaatgggagttgcagtataaacaggctgaatgggaagttaattctgttgagcagcagatcaatttgcagaatatgcaaattaaagcagctaataaacgtctggaacaggttgaagctcaacaacagcaggcaatggctctactggattatttctccgaacgctttacaaacgaaagtttatatacctggctgatcagtcaactctccagtttatatttacaagcgtacgatgcggtgctttcactttgtttatctgcagaagcttctttgctatatgagctgaatttgggcgagcagagtttcgtcggtggtggcggttggaacgatctgtatcaaggattgatggccggtgaaacactgaaattggcgttaatgagaatggagcgggtttatgttgagcaaaactctcgtcgtcaggaaattaccaaaacgatctcgttgaaagcactgctcggtgaaagctggcctgcggagctgaataagctaaaacaaaaaacgccaattaactttaatctggaagaacagatttttgttgaggactatcaagagctgtatcagcgcagaattaagtcggtttcggtcagtttgccgatgttagttgggccttatgaagacgtgtgtgcgcagttgactcagacctccagtagttatagcacccgggcagacctcaagacggtagaaaatatgctgactaaaagaacgtttgccgatacgccgcacttggttcgtagtattcaacccaatcagcagatttctttatcgactggggtgaatgatagcgggctgtttatgcttaattttgatgatgagcgtttcttgccatttgaaggttctggcgttgattcaagctggcgtttgcaattcaccaatttgaaacagaatttggatagcctcaacgatgtcattctacatgtgaagtatacagccgcgattggctcatcaactttcagtcagggcgtaaggaaaatattggccaatataaacaacgatgaacatcatcatcaccaccaccaccactaactgctgtttttgatcagctatttattttttcaatcatatttatctcacttggctcctttttaatcaaaggagccaacaaaaatagtggagttctgttatggtcaataaatatacttacacctcatctaaagcaatgtctgatattagtgatgttattggtgaacctttagctgcatgggatagtcaggtcggtgggcgggtatttaacgttatatttgatggtaaagtttataccaatacctattgggttgaacgctggcaggttcccggtattggtagttctgatggtaaccctcacaatgcctggaaatttgtacgggcggcaacggcagacgaaataaataaaatagggaatccaaccacagcagatgttaaaccgacggaaaatattccttcaccgatattggtcgaagataaatataccgaggaaacgtattctcgccctgacgtaaattttaaagaagatggctcgcaagggaacctttcttacactgcaacccgagtttgcgccccgatgtacaatcattatgttggtgataaaacaaaaccgaagctgtcggcttatattaccgactggtgccaatatgatgctcgtctagacggcggtggtagtaaagaagaagaacgcgggcgtggttttgatttagcgacgttgatgcaaaatcccgctacctatgatcgactgattttcagtttcctcggtatttgcggtgatatcggcaataaaagtaaaaaagtgcaggaagtctgggacggatggaatgctcaggcgccgagtttaggtttacctcagattggtaaagggcatattgttccgttggatccctatggtgatttaggcactgctcgtaacgtggggttgccgcctgaaagcgccgataccagtattgaatctggcacatttttaccttattaccagcaaaaccgtgctgctggcctattgggtggattgcgtgaactgcaaaagaaagctcatgcgatgggccataaactcgatctggccttcagtattggtggttggagtttatccagctatttctccgctttagcggagaacccggatgagcgccgcgtttttgttgccagcgtggttgatttctttgtgcgtttcccaatgttcagctgcgtggatatcgactgggaataccccggtggcggtggcgatgagggaaatatcagcagtgataaagatggcgaaaactatgtattgctgattaaagagctacgcagcgcattggatagccgttttggttacagtaacagaaaagagatctcaatcgcttgtagcggcgtcaaagcgaaattaaagaaatccaatattgatcagttggttgctaatggtctagataatatttatctgatgagctacgacttctttggcaccatctgggccgattatattggtcatcatacaaacctgtattcaccaaaagatcccggcgaacaagagttatttgatttatcggccgaagcagcgattgattatttgcataatgaacttggtattccgatggagaaaattcatttggggtacgctaactatgggcgctcagcggtagggggggatctgacaacccgtcagtataccaagaatggcccagcgttaggcacgatggaaaatggtgctccggaattcttcgatatcgttaaaaactatatggatgccgagcacagcttaagtatgggtaaaaatggttttgtgctgatgactgacacgaatgccgatgctgattttctgtttagcgaagctaaaggccactttatttcattagatacccctagaacggtaaaacaaaaaggtgaatatgccgcgaaaaataaattaggcggcgtattttcctggtctggcgatcaggattgcgggttattagccaatgcagccagagagggactgggttacgttgccgattctaatcaggaaacgattgatatggggccgctgtataatccaggcaaagagatttacttaaaatcaatttctgaaattaagagcaagtaagcgtttacagcgccaattgttatttaatcgcgattgatttctattaattatctagcctattaatttaaattaattgaaaaatcagatagcggaacgtggcgggttgttttattgcttatttaaaatggcgttatttataacctgtcacggtctggcaatgttcggctattgattaatagctgacaggagtctttatgcaaaattcacaggaaatggctatcacgaccctttcattgccgaagggcggaggggcaattaatgggatgggcgaatcagtgggtcaagcagggcctgatggaatggtgaccttttccataccattacccttctccgcaggtcgtggcgtagccccggcgctttcgttgagttatagcagcggtgcagggaatggcccttttggtatgggatggcaatgtagtgcgatgagtattagccgtcgtactcaaaaaggggttccccaatataacgaagatgacgagtttcttagcccttccggggaagtgatggctatcgctttaaatgatagtggttttgaagatgtgagaacggctaaccgtctacaaggtatcccattacctttcagctataaggtcactcgttaccagccgcgccttattcaagacttcatcaaaatagaatattggcaacccgttaaacaaactgatggcacgccattctggataatttattctcccgatggacaaacgcatattctggggaaaaattcccatagtcgggtggctaatgctgaaaacccatcgcagattgctagctggctgttggaagaaacggttacgcctaccggcgagcatatttactatcaatatagcggcgagaatcaagtcaattgtactgatgcggaaatagcgcttcatccacaggatagtgcccagcgttatttagcgcggattgactacggtaatatttcccctcaagccagtttatttgttttagatgaagaactacctaatctcacccagtggttattccatttagtgtttgattacggcgagcgagatatctctattaataaaattcctactttcgagggaggaaccaccggttggttagcccggccagatatgtttagccgctacgactttggaattgaaattcgaaatcgccgcttatgccaccaagtattggggttccatcggctggaggccttgaatgatcgagatgtgactgacgaaattcccgttttggtgaatcgactcacgctagattacgacctgaataacagcgtcagcaccttggtagctgtccgtcaggtggcgtatgaaacggacggcagcccaatcactcagccgccgttagaattcgactatcagcgttttgatacagggagtattcccggctggcaggaaatgccgcagcttgaggcttttaacggctatcaaccataccaaatgattgatctgtatggtgaaggtacaccaggcattctgtatcaggaaacgccgggtgcctggtggtacaaatcgccgcaacgccaaattgggggcgattctaatgccgtgacctatggggcaatgaaagcgttgcccaaaatccctcgcttgcaagagggagcgacgctgatggatatcaacggtgacggtcgtttggattgggtgatcacttcagcgggagtacgaggttttcatagtattcattcgacaggtgaatggacacattttacaccattgaacaccttacccaccgagtattttcacccgaaggcacaattagcagatctggttggcgcgggattatctgatttggtgcttatcgggcctaaaagcgtgcggttgtatgccaatcagcaggggaactgggctccggcgcaggatgtcacgcaggcagaaaacgtcagcttaccggtcattggaatcgattcccgtcaattagtcgcttttgccgatatgttaggttcgggtcagcagcatctggtcgagatcacggcagatagcgtgaaatgctggccaaatatgggacacggccgttttggccaacctttgactttggaaggatttagtcagccgcagaccagtttcaaccccgatcgggtgtttctggctgatattgatggttctggcactaacgacattatttatgctcattcggaatgtctagagatctacctaaacgaaagcggtaatcgctttagtaaaccaatctctttattactgccggacggtgtgaattttgataacacctgccaactgcaagcagctgatattcaaggattaggcatcgccagtttggtgatgacggtgccgcatatgtcaccgactcattggcgctgcgatctggcgttgaataagccttggttattgaatgtgatgaataataatcggggggcggaaacctgcttgttttaccgcagttcggctcaattctggctggatgaaaaacagttggttgaggcggcggggcagcaacctgaatgtcatttgccatttcctatgcatttacactggcgtagcgagatttttgatgagattacaggtaaccgtctcactcaagaacaagaatatgcccacggttcctgggatggccaagagcgggaatttcgtggctttggccggttgattcagcgcgatacggatggttttgcccagggaacggtcgacattcctactcatccttcccgaactgttagctggtttgctacgggaatccctgagattgacaccacgctatccgcagagttttggcgcggagatgatcaggcattcagccctttctcacctcggtttactcgttgggaaaacgattcagaggctggttccgatgttgcttttataccttcagagcatgatgccttttggctgaatcgcgcgatgaaagggcaacttttgcgcagcgaactgtatggtgatgatggcactcccgaagccgagattccttattcggtcacagaaatgcgtcatcaggtgcgggcgttgcccacaaccgacgccacagtaccttcggcatggtgttccaccattgaaacccgaagttatcaataccaacgggtggccgctgatcctcaatgtagccaacaagtagtcataaaagcggatcgctatggttcgccattattaagtgtggcaatcaattacccgcgacgtaaaaaaccggaaaagtcgccctatcctgatgatttaccggaaacgctgtttgatagcagctacgacacgcagcagcagcaactgcatctgaccaaacaacagcaaaattattttcatttgaccaatgacgataactggctgttagggctgccaaaagagcaacgaaacgatggctatcagtacgatcaggaacgcgctccggctaacggatttacgctagaaacgctcatcgcgtccaatagcctgatcggttcgaatcagccgtttacctatttgggccaaagtcgggtggcttatcagggcggtgtggatgaacaaccgtctttgcaggcgctggtggcctacggcgaaaccgctattctggacgagaaaaccctacaggcctttgtcggcgtgctggacagcaaaacacgcgatgaattgctgttttccgccggttatcagttggctccgcgcttgtttagggttgagtcagagccggatgtttgggttgcccgtcagggttacagcgaattcggtgactattcgcaattttggcgtcctctcagccagcgtagtacgttgttaacagggaaaactacgttgaagtgggataagcattattgcgtagtgatagaaacccaggatgcggctcaactggtgacacaggcgcgctacgattaccgattccttaccccatatagcctgacggatgccaatgataaccagcactacgtggttttgaatccgtttggggaggtgattgccagccggttttggggaacggaagcgggtaaagacgcgggatacagcactcctcaagccaaaccttttgtggtacctgccacgattgaggcagcactggcgttaagccccggaattccggtggctcactgcgccatttttgaacctgaaagctggatgcaaaaactgacgcagcacgatgtttccgaacgaatggcggataacggtactctttggaacgcattgctgcaggcgcgttttgtcaccgaagatggttatgtctgcgcgctgggtcggcggcgctggatggcgcgccatggtttatcggtgctgatgttgacgctactggccgagattccgcgtacgccgcctcattcccttactattactaccgatcgctacgatagcgatgaccaacaacaattacggcaacgtattctattcagtgatggttttggccgcctgctacaaagcgctcagcgtgttgaagccggtgagagctggcaacgcagcgaagactcctcgctggtggtcaatgtttccggcacaccagccttagtggtgacggataatcgttgggcggtttccggacgtacggaatacgacgggaaagggcaaggaatacgcgtttatcagccttattttctggatgattggcgttatctcagcgatgacagtgcacgcactgacctgtttgccgacacgcatatttacgatcctttagggcgcgaatatcaggtcattaccgcgaaaggttaccggcgtgaacgccagtataccccgtggtttgtggtgaatcaggatgagaacgatacggcagcaaatctggcgatttagttcccataagaaaattcgccctacattgtcgtggggcggatgaaaacgaggaaatatggtgttgaaagccattccctatcaaaaggataaccgagatgaaccagtttgattctgcgctccatcagggcacgccgggggttagcgtgctggataatcgtggccacgttatacgggagttacggtattatcgccatccagatacaccgcaggaaattgctgagcgtatagcttttcatcaatatgatagttatgggtttatttctcaaagtatcgatccgcgtctggcggaaagacgaaagcaggatagttcggttaagccgaatttgtcttactttacggcccttagcggcgaagttttgcgtactgacggcgttgatgcaggcacaatcttttccctgaatgatattgccgctcgtcctgccattagcatttccgccaccggcgtgtcacatacctggcaatatgaaggtgaaaatcggccggggcgggtactcagtcgcagtgaaagggagaaagatcgagaagagcgaattattgagcgcttttactgggctggcagtgatgcatcgcaaaaagcgaacaatctggcggggcaatgcttacgccattataacagcgccgggctgaatcaaacgctgagtattgcgctcactggcacgccgatatcggcgtgctttcagccactgctggagagcgcagagccggaatggcaggggacgaatgaatcggcgtggctggaattattgacgccggaaattttcaccacttacaaccgcgccgacgccaatggggaaaccttggtacaaacggacgccatggggaatatccaacggttggcctacgatgtagccggttttcttaaaagcagctggctgagtttaaagggcgggcaagagcagatcatagtcaaatcgttgacctattcggccgccggacaaaagctgcaagaagagcacggtaacggtgtgctcaccacttatagctatgaggcggaaactcagcgtttaatcggtatcagaaccgagcgtccagcggggcatttatcgggagccagagtgtttcaggatctgcgttatacctacgatcccgtaggtaacgtgctgcgtattaccaatgacgcggaagcgactcgtttctggcgtaatcagaaagtggtgccagaaaatacctacatctacgacactttgtaccaattagtcagcgccaacgggcgcgaaatggcaaacattccgcaacagagtagccaacttcccacactgtctccgattgataacaatgcatataccaattacatccgcaattatcactatgattctgctggtaatttgatgcaaattcgccatacatcggccgcagccaataatagttacaccaccaatataactgtttcaaaatacagcaatcgtgcggtattaagctcactaaccgacgatgtcgataaagtggaggcgttctttgacgccgcgggacggcagaaccaactattgcctggtcaaacgttaagctggaatgctcgcggtgaactggcgaaggtcacgccggttgcgcgcgatgggcaggaatctgacagtgaaacataccgttatgatgctaatagtcagcgcgttagcaaaatggctattcagcagtccaataacaatacccaaactcggcgagtgctctatctggcaggtctggaacgaagaacaattcatcaaggtaatacgttgtttgaaacgttactggtggtgaaaattggcgaagctggccgggcgcaggtacaggcaatgcactgggagcttgggcaacctactgaagtggctaacgacgaactgcgttacagttacgataatctgattggcagcagtgggttagaggtggatggaaccgggcaattgatcagtcaggaggaatattacccctatggtggtactgccgtgtggatggcgcgcagtcaacgagaagcgagtgataaagcctatggctattcaggcaaggaacgggacgccacggggttgtattactacggtttccgctactatcagccgtgggctggccgctggctgagtgccgatccggcgggtacgatagatgggctgaatctatttagaatggtcaggaataacccgattgtactccatgatcctgacggcttggctccgggtttttttgagcgcatcagttcatttcggaagaaagacacattaacgatttcatccctcaaaggaaccgggccgttttatacccgttcagaaagcgagattgacatcgattttctgttctccagacaggatagggataaagactttccgccacagaaccacaaggaactttctgcggaagatcgtcgagaggtgttagaagtttcctcaggtgagaatatcacatcagccaataaatcctctaaatggtatgcaggaacacattgggaaactaaaccattaaaaaataatactgatctggtggttcttcacaacggtgtgcagggtgccgcagggattaatattaatctgaatgatataaaacctggccgctccgtgctggtgacggctgggacattaaccggatgtacgatgattaccggtgttaaagggaataatttttatgctttgcatgccggaaccggaaccccatccgaaaattgggtaaccggtgaacacggagtgacggataatttccgaatgctgaataagttaattccggatgccggtattgacctgaatccagaagccgtgaatgacagcttattaacgatattggattattttgataatggaactatcgcttacaacggtaagaaaggcagtgaaatacatagagatgcagataatattctaaattaccgaaccacaggttacgaaaataccgttggtgtatctttcagtctattaacaaaagacaaaaatggtgaggtgtcggcatcaacgttattagagcttggtgagctaaaaccgcataagaaacatagaacaagaggccagtttggaatgactgaactgaaatacgaggccagaaagaataccgtcgttaaattacgctgaagcactagcctgcctgatttaatcatttatttaataaggcaggctattttttcatcctcactatgttgtttttatattttcaaactgcgctatcaaaaatagccataaataatatggggtgtcgagcaacattcttttagtacgtaatcgtatagttcacatctatcgaacgtattcccattcatgtgctcgtttttttcatgtttaaccaggagatatttatggacatacagctgtttagtaaaaccccatcggtcacggtgtttgataaccggggcctaagcgttcgcgatatcgcgtatcgccgtcatcctgatacacctaaagtgacggaggaatgtatcacctatcatcaattcgattttcgcggttttctggctcaaagtttagatccaagactaaatcataaagaggttactaatttttcttatctaactgatttaaatggaaatatcatatatacgcaaagcgttgatgcgggtaacacgctagttctgaacgatactgaaggaagatccgttatagcgatgaccaatattagcagaggggagaatggtaaggacgacctcagtctggccgtcacccgaacctttcagtatgaaaatgccccgttgccaggccgtccactgagtgtaaccgagcaggtgaacggcgaaaacgcgcggattacagagcattttgtgtatgcgggcaatacgccgcaggagaagaatctgaacctcgccgggcagtgcgtcagttattatgatgcggccggcctgatacagacagacagcgtgtcattaacgggtaaaccgttatcggttagccgtaagctgctgaaaaatttggatgatacgaacatcttggccgattggcaggggaacgatacttccgcctggaatagtctgctggcgacagaaatctatactactgtgactcgcacggatgcggcgggtgcggtgctgacaaccattgacgcagtgggcaatcagcaacgcgtggcgttcgatattgcgggccaactgtcagcgagctggctgacgctaaaaggagggcaggagcaggttatcataaaggtgttgacgtactctgccgctggacagaagcttcgagaggaaggcggtaacggtgtggtaaccacttatacttacgaggcggaaactcagcgtttgatcggtattaaaaccgagcgtccgaacggccatgccgccggtgcgaaggtgctacaggatttacgttatgaatacgatccggtaggaaatgttctcagcatcactaatgacgcagaggaaacgcgtttttggcgcaatcaaaaagtggtgcctgaaaatgcctaccgttacgacagcttatatcaattggtcagcgccagcggacgggaagtggcgggagctggccagcaaggcagtgatttaccttcccctctcgttcctcttccctctgattcttcggtatatacgaactatacccgcacttatacctatgattccgccggtaatctaatgcgcatcagacacagtgcgcccgcgaccaataataattacaccctaaacatcaccgtgagtgagcgtagcaaccgtggcgtaatgagttcgctaacggaaaaccctgctgatgtggatgcgctctttaccgcaagtggaagccaaaagtgcctacagcaagggcagagcctgatttggacaccgcgtggtgagttacgcactgtgcttttagtggctcgcggcgaaacggcggatgacagtgaaagctaccgttatgacggcagcagccagcgtattttgaaaatcagttcgcagcaaacgaatcacagtgcgcgggtgcaacgggcgctatatttgccggggttggaatggcgaactatgactggcggcgtggcggaagcggaaaacttacaggttatctgcataggtgaggcggggcgtgctcaggtgcgtgtactacattgggagagcggaaaaccagatggaataatcaacgaccagatacgctggagctacgataacctcacctgtagcagcggtctggaagtggatggcgatgggctggtcatcagtatggaagaatattatccctatggcggaaccgccgtgtgggcagcacggagtcatatagaaacggcatataaaacagtccgatactcaggcaaagaacgggatgcaaccgggctgtattattacggtttccgctactatcaaccttgggcgggtcgttggctctccgccgatcctgcgggtacggttgatgggttaaatctgtatagaatggtgagaaataatccactgcggctcaccgatccggatggaatggctccattagattggctggatttggatacgactaatgcgtctagggatattgttaaggccatttaccaactaaaccagatagacgggcctcatagaggcgttagagatacttatcaacgtatgactgaaagtaccggaatgattttacaggagaccttaaataatgaggcggtgctaaaaggtataaaacagaaagacaaagaaaaaaaatcaagaggaatgaaatttaccaattcaaaattaaaaacctacgccgctcatgcgggtgttttaaatacgctgcaaccggatccggtttataaagatggttttctgaatcttcccggaagcttgggtaataaaaatacctttcccggtgtggaactgattgaggataaagtgaaaccgtcactgagtcagtatcatcctgataaactaggtaaaagtcaaagatggaagccagaatcgagcctggggtattaccgagtcgcagatacagaagcatttatcactggcatccgtagccaatataaatcatcgggaacagatcttcatgcggtggttgaagggcgaattcgggatcatcttttagcaaataataatgttttacctaaaatggccgggatcgccggtttacatgcagaagtacaggcgctgaattatattatttctaatcctgatattgaaggtggaaacgccgaaaggctcaacggcagttatatctttacccaaaggctggttggggatgtgaatcaagatttccccgcctgctataactgttccggaattatatccggtctggaaaacgtcatgaccggacgagtcaacaatgatgtaagactaaagcgtcgaaagtcattttagaccagcgcgcaacgttgaaatagggcctgatgtgataggcattatttttgttcaaatctgaatacgtaagttataccgctcccaatattgggagcgtttaattttcgggtattattattcccctaaaaatgtaacgaccgttgatatttctggcggcatgagggagggggtaaacgttttacgaagtcacccaaggttaaatggtgttttatttgatcggccagaagtattggcaacgaataggattgggggaattaggtgatgattcttgttgggagtcgcagccagtcttttgaatccagtcctgccgacgatatttatttgtgaaaatacatcgtgatagattggcctaaccagcaggtacggaaaatattaaaatgttgccgtaaggcaatgcgagcagatcctacaattattaatattgaagctgttatcggttaaaataatggttctaatttttggtggagccaaaccgtcttgctatattaggttttatgattttatgattttatgattttatggttttatggttttatggttttatggttttatggccgtatttcttatcgccaggcgttaccacgaccaatattaatgaatttcgtaaatttaaggtgcctaaaatatgttcattagttattttcattaaaaataactactacaattagaatctctcctcacggcaaagtagagtttattcccatcacttccccgtaaccttcagttacaacatttgcggaaagtaaataattatatacctcatgtccatattggcctacaaatttgtagaatgaaaaaatcggatattctcaggtggtcgtaaaattggtgtggccgacgtatattgccgatttttgaaagtatattccgcttaaaaacgttagcttctttcatgtttattacgaagttcgggtttatattttggcaagaccaccgctataaatatctgtctattcatctcataattttcttagccttttttcaggtacatattatgcctttataccctttagttcccaataatcgtcaggtttcaattgaaacacagttaattgcaaatgccactacgccggaagagcgcaccgaggttaaaaatctgtttgcccagataaagatgctgcacaatgttccagaatcgcagacggtggtgtcatcaggccggccaagtctaaaaaatgtcttgttgcatggattgttggcacaaggcggtatgccgttaacatccgagcgggccgctcctgtgctgatcgcaggacacggagctaatcctatagcccaaacgctggggcaggttcgaaatttacagcgggaaatcgcaaccactcccactcttctaaccgaagaaacaaagctgcgtatgccacgctatgcggtatttccacctaaaacaacgcctcaaccgccggttctggatgacgtcaaaattgttaagatgtttgatttttcctgtatgaataacggcgaaaatctgacttttgcacaaatactacgtcaaattggtaaaactttgaggcagccaattaccatgatgacggttgaaagtaagaatatagatagctggaataaaggccaagggtgccctacgaatcaggaaatagagaaagcgaccaatattaccgagaagattgattctattacttctcagcttttaactttattgcccggtagccagcctttggctattgctcaatatattgtcggacctttgctggaacacgcggctaatgatcttgaaggaaagcctacttcgccagaagaggaactgaatttattacagcaagtgactcagcaagccaaattcagcatgagtgccagcacgcatagtgaacagcaacgcttatataccaggccaatatctgaaccgaaactaccacaggtagagctgccaaagttctatctgaagaatggagttaaccatattaaactggcgctcaatggcaaacttcatgatgttcctctcgttgagcataaagggaaaagtttcgctgtgttgcctaaaggaaaaaatggcggagaacgccggcagcaagtctatttcagctacctttcgcaggagtggaaaacgactggcgatggtaaattcattcgctttagtaaattagatcagcgtgtggcacatgaactctcccttcattctcgccatcgccataaaactgccgacggcaacgccaacgtttacagcgtacgtaatcctgtttcatctcagcctcaacgattgcaggccattgaactctatggtcgattggtgccttatcgctacgatttggccagtcatgagcaatttgtttacgatgctaggcagccagaatccacgggtcataaagtagaatatgcgaatcaagaatggcacattaaagcaccggtctctctggacgtggtgcctgaagtgtctacggccatgggtaaatatgatattcaaccgctgcagttgaatgaagcgaagctttctgcgccaaaccatttcggtattcaacgtacccgtaacggaaagcaggtgattaagattgatggaaagcattattcaatttctcaacaaggaaagcagttgctactgggacatagaaataatattcctatcgagctgacatcaggggaagggagtaaggtaaagctggcattggcgaatacaggaacggcgggtaataaggcatttaatctggtagatctgccaataattggtaaatccttgaaggttcaaatggctcgtaaggttattaccaaatccttgccaattgctaaagctaaaattgaactgactcttgaagccatggataagcccgaactcagagaacaggtgaaattagcgcaaaaagcgtattttggcagagagtttccgcttaaaccacagaatgaaattatactacgtaagacgttgagtcatatcaaaaatgacttagagcgtattagccatcgtaatttcagtttcgacagtcaggtaggagagacaaatacggtggccgagttgtcaaaagatcaataccgtcagttgggtagaaatcctaatagcaaaataatcaatgtaggtcgcgacggttttcacacctattacaaaatgatgggaaaaagtaagcaagcggtggccgatgtactcattcatgagttgtctcacggtgcgccaaactcacttgattttgtgtatataggtactcggcagcagacgaaagtcggcaacgttgatgtgttcgaactgattaatctcggaaataacaatctcaataacccagatgcgggtcaggcaccgcaaagtgtatatgcgggaagcgatctcaaggatttcaatagtattaatacttcgggttcaaaaggtttgaagaatgctgactccattgcacaatatgtttcctttttgagtaaagcagaacgaaatcctgacgcttttaatcaggattatcagtctctgctaacggcagcggaaaaatccaatgacttccagcagcgtgtagaagaaagcgtgccagtcagccgcagccgtcgcgcggtagagtcgattcatcagccgccgtctggtcttctgttagctatagaaagagattctgggcgctatcacctctatcgaccactgtagtgttaatccgaatggctaaggttataatgctgtcatgacttctcgccggataatacatcatactttcttgtttatccggcgatgccaaaaaataaagagctaaaagatgacattatttatgtggcagataatgaagatgtattgccgatattcaatagtaaaaatacctgcatagcttgataaagtcgaaagtttgaattttcgtgaattaatacgacgagaagtcagagctttgcggagtatttaaccctatcgttcggtcttttcattgtgaagattgaaattagaatgattccaatataagaaataaaaaatgaatgggaaatagcaggattactcactatggcgaaattttattagttggctgccgaaaatacggcagcacaatgttaactgattagataagacaaaatagacatatatttaatggttaggcctctggcatggccgaagagtgatgtgttgatattttccactcattgccgtcccaggcataagtaaaggtataacgtgctgaaaccgttgatttatcggaaaaggtaaaggtataggtgccagtatcaacggctttattgcagccaatacgtatggttcggctatcaattttgccaacgggttttttctccaggaaatgctcaaaataatcgatacgttctgcgtctgtcaggcgtaccttattcgaaaccgtgggcagtaataccgcatcgcttaagtaattacctgccactttcttagcatctccggtctgcaaagagtcattccatttatcaaataaccgttcaatttgtaccgattcaaccttagtgcaattgggagccgttgtagccaaagcggaaccagaaatcagcagcagtgagccgaataagccaagtgattttttcatatttattcctttcttcagttagtttttcctcctgtcagaagtaacagtaataacctgagtaaacaacatggttttaatatagttacatttatttactataatttaggtaactatgtaattttatatattgaagtgaaataacatactgattaatttacagggtatgagtaaaaaaacaggaataaaaaacctaattatttttatttccgcccataaaactctattgacatcgagttttatggttcattatcaatatatttttgattgccatgctagaattcaatttggttcggttaatcaattgagttgcagattaatcatcatgataattaatgattattttatttgttatactcagcatttatagaatggaatatatatctttattgggcaggctaatttgatgaggggggtattttagaataagacttgattgatttcttatatcgctatcctgtttttgcactctctacaaccgagttacctagaaattatgaaaaaagtcattattgctactattttgatgctgttttcattcagtgcattggatcaggatgcggatgtcaataattcaggcgatgtattatctacatcaacaacggcggagataatcaagaaagactgttctggaaaaacgctaaagccgtggccagttttgcttgaccacgacaagggagacctatgacgatgacggaagcgcttgtctaagctaaaactgtgatgattgataaggtggtgtgggagtagataaaataatgcggtgagtatcgggagcatggatattcaagctgttgggaattgttgtcgatttgtgtatcttcttacttggttaactcgcagcgtagttcaaggatgatttatatgagttttaaaaatttctctgttttaatggtgttgtatttcagttttattttctctctgaacgctggtacgaatatcagccatgattggcactatgttcctccggaacccgcttcttctttggcaaagagcgatcgatcgtcgctagatgaagcgctggataatcaaaagaatagaaaagcgctgaagtgggagcttaaagagcgatatcgaacgtattccgagcagaaaatcgatcgggtaacaggagaagtggcagaggaaaaacaagggatagtgtttgaataaatttattgagatgagattggctcaaaatttcacgatgaattttatcttatctaactataaattataggtttttttctgatctacggtgttttggcaaccgttcgcaagtttttagctgtgaatactatttacagaggggttcatgactttgagagcctacgataagtcttaaagtaacccttgtttattgtacgtatatgttttgccacatatactgcctgtcgctaaccgccattagctcattatggaagagcgtacgaccatttcagttgtaggttcggggttcgagacctcgatggcggaccaaataaataagcaaactgggtttaagtcgatgacgggtacccctgagatgtccagtttgcttactcagattgatttacggcctatttatggattattaccaacggctgtttaaacagtgctccgaatattcatgcggtcatcgtataatggctattacctcagccttccaagctgatgatgcgggttcgattcccgctgaccgctccagctttaaataccacttcagccgtttaacggctccacgcaatcgagaaacggtaggccgttaaactctgttctgacatcagagcgacatcttctttatcacggtgataatgatcgacggcgatatcgccagtggtattttcaaatgtttttccgagaattcgtacaaatttatcccaaactgaagctcctttcacatcgagattccaggcttcttctacctgattggcagcagacgcagagacccataaaaaatgatttggaaaaactttagttttttttctccattatttttatacctttcggctgtcatttttagtattacaagaatggaggctaaactacgtgggtatgattaaaatcgtaaatccgaacactttattttatgcgctactgtgttcacttatctctctcgcaaaaaacaacctgcacagcctgtttttgatgacgaagtttatttgttatatagagaaaaatagtatgggtgagacgttaaagcggtgcgaaagtgttttttgcgggtgttgttaaatgccttagggatcgaattaaccttttggagtataaagttggtgatgttttctcttcagaacaaaatgagctttggcgtggaatatttcacgtaataccttgcgtaagataatgatggttttagtggaaaaagggctgcttgaaaaacatcatggttccggtatttatataagaaaaaaatcttcagcccaatgttaatacgctaaaaaattttttgagaatgctcagcaggcgagtaaaagttgtaccaataaagtgctctagtttatggtgataaaagccaatgcggatattgcttctcagctgaaagtaaaaacgggcgagcaggtttatcacgcgatattaaaactatcgctccgatcataatccgtcaactggctgtgaaagtgagcgatctccgctgctattttcatcattgaaaataggaatggctttcccatgatcgattatcttaattttctccctccatgccggtttttctgtttttaatctattctcctctgtgtttttaatcctgctttgatggcaggcttagtcatttttaacctgattgcactgattaaaggaaaaacagcttattaaatgggttttgtgcacaaataaagtgcgacgaggtacagggttaatcttttttttgtatttaaattactgatttttaagccaaattataattggcattgtaattgctaaaactatttcatcttgtataccagatgggataccaatcaatgcctatattaactgtagcggaatgggtcagtttttatcataaacagcctgaacggctgaacgcggcgcttcagcacatgagtaaagaatggcatagcgatgataatgcatggatttacttggctaatgagcaggaaattggttcgcaggtcaatcggctgttaaaggaaatcaattccggtggaaaaaaggccagtgatttccccttatttggcgttccctttgcgataaaagataatatcgacgttgcaggtatgcccaccagcgctgcttgtcccgcttttacttatttccccgaggaggacgccaccgtagttacccgcctgaaagccgcaggtgcgatagcgattggaaaaacgaacctcgatcagttcgcgacaggattggtgggaacccgttccccctttggtacggttgctaacgcttttaacgcggactatgtgagcggtggttccagttcaggctctgcctcggtggtagctcgcggtttggtctgtttttcgttaggtaccgatactgctggctctgggcgtattccggctggtttcaacaatatcgtcgggttgaagccgaccaaaggctggctgtctacgcgtggtgtcgtcccggcctgtcggctgaatgactgtgtgtctatttttgctttaagcgtcgaagatgcctattgcattgccgaactggcgggaggttacgatccgctggacgcctattcgcgcagacatccgcaaactgcatccgcttgtttcaacccgattccgcgttttgccgtgccagatagactggagttttttggcgactttcaggcggcagtcgcatttgaccgttcgttgacacgtttaaccgaaatgggggccgagctcgttgcgattgatttctctgcgttccgggcgttggccgaacagctctatcaaggtgcctgggtagcggagcgcacgctggccgttggggcgatttttcatgcgcaaccggaaaccatggatcctcaggtgcgcgctattgtcgccaatggccttaactacagtgcctgcgatgcctggcaggcggaatatactcgtgcggagctggcgttacgcatcaatcaacaattgagtcactttgatgcgctggttgtgccgacgtctcccaccattcgcactctttctgaaatagccgaacagccggtgcgcttcaacgcgcagttcggcacttacactcatttcgctaatctggcggatttaagcgcgctggcgttgccgggatattttcgagccgatggtctccccgccggaatcaccttgatcgccccagcctggcaagatcgggcgctgagtcagtttggcattctctggcaatcagcgctttcgcaaaaagttggtgcgatagggaaagtgctggccgcggctacgccgctagcggccagctgtcaccatgttcgcgtagcggtagtgggggcgcatctgcgcggtcagccgctcaattcacaattaacccgtcgtgcggccacttttgttgcagaaacccataccgccgcagattatcgcctttatgccttagccaatactcagcctgccaagccggggctggtgcgatcccgtcatggccagcggattgcggtggagctttgggatattccgctggcccattttggcgaatttgtggcggagattctgccgcctctggggataggaacccttacgctggaagatggttccacggcgaagggatttatttgcgagcctacggcattgaacgatgccacggatatcactgcctggggcggctggaaagcctggttggcccgtgatcaccgagcctgaggaggctatatgtttaattcggttttaattgccaaccgtggcgaaatagccgttcgcgcgattcggacgctaaaaaatatgggaataaccagcgtggcggtgtattccgatcctgatgctaatgcccagcacgttatcgatgcggatattgccgtggcgttgggtggggacaaagccagcgacagctatctggatatcgacaaaatccttgcggcggccagacaaagtggcgctgaagcgattttccccggatatggctttttgtctgaacgtgccgagtttgctcaggcctgcgaagacgctggcattgtctttatcggccccactgcggaacacattgccagctttggtttgaaacatcgtgctcgcgccttggccgctgcggtcgccatgccgatgacgcccggaacctcattactcgcaaccctgcgggaagcgcaaagggcggctgaggacatcggatatccggtgatgctaaaaaccaccgcagggggcggaggaatcgggctgatgcgctgcgataacgagggggttctggtagaggcgtgggatagcgttaagcgtatggggcagcagtttttcagcgacgatggtgtgtttatcgagcgttttatcgaccgggctcgtcatctggaagtgcaaatttttggcgatggaaaaggcagggtggtggcattgggagagcgggattgctcgctccagcgacggaatcagaaagttgttgaggaaactccggcaccgaatttaccgcaggctacgcgggaagcgttgtatgcctctgccattgccttgggggaatctgttaattatcgcagcgtaggaacggtggagtttatttacgatgcggccagcgatgcgttttattttctggaagtgaatacccggttacaggtagaacatccggtgacagaaagcgtcaccgggctggatttgattgaatgcatgctgaaaatcgcggcgggcgacgcgctggattgggaacgcatggttcagccaccgcgcggcgcatccattgaagtacgtttgtatgccgaagacgcgctgaaaaatttccagcccgcgccaggcgtactgaccgaagtctgtttccccgaaaatgtgcgcgttgatagctgggttagcagcggaagtgaagtcagcgtgttctacgatcccatgatcgccaaaattattgtccacggtcaggatcgccatcaggcgctggagcggctggtaattgccctaaatacgacacgcttgcatggcattccgaccaatctcgattacctgcggcagattatcggtcttgccgaatttaaggctggcgtgatgtggacgcgtctgctggatagcgtggtgtaccaggctcacagtatcgaagtgttggaaccgggtacctggagcagcgtacaggactgtccggggcggttgggttattgggatatcggcgtaccgccttctggcccgatggatgatttcgcttttcgtctggccaatcgtatcgtcgggaaccatccatcatcggcgggaatggaatttactctgcaaggcccaaccctgcgttttcattgtgatgccaccattgccttgaccggagccgactgtccagcagcgcttgatggtcgtgtcgttccctattggcagccgctgatcgtgaaagcagggcaaatcctgacgctggggcgagccactcgcggctgccgtacttatctcgcggtgcgttacggcctggatgtaccggtctatcttggtagtcgctcgacgtttgctctggggcagtttggtggtcacgccggccgtaccctgcgcgtggcggacatactggcgatatctcggcccgatctggcagcctgtaccacccctgcgccgattgcgctgccgcaaataccggagccagccctgatcccgcagtacggcgacttgtgggagattggcgtgctgaacgggcctcacggtgcgccagatttattcaccgccgcatcgatggaaaccttctttgccagcgaatggctggtgcattacaactcaaatcgtttaggggtgcggctggtggggcctaagcccgaatgggcaagagctgacggtggcgaagcagggctacatccgtccaatgtccatgactgccaatatgccattggttcagtgaatttcaccggtgattttccggtgattttgactcaggatggccccagtctgggggggtttgtgtgtccggtgaccattgctaaagccgaactgtggaaagtcgggcaggttaaaccgggcgaccgaatccgttttcgcagggtgacgtttgagcaggcgcagtctctggcgtccgcgcaggacgcggcgttggctgatttacaggccatgtcggcaccagtctcaacgggaaaagtatcacccattattgaaccaatacatacgcgaagtgcagcgatactggcggaattaccggcacacaatcaatgtcctgcggtgatttatcgtcaggcgggcgataactacattttgattgaatacggcgataacttgctagatttggcgatgcgcctgaggatttacctgctgatgcaggcaattacccaaagtgaaataacgggtattgaagagttgtctccgggggtacgttcgctccaggtgcgttacgacagtcagcgtttgacgcaaagccaattaatggcgctgttgctgggtttggaacaaacgttggaagacgtcacttcactaaaagtaccttcccgtatcgtgcatctgcctatggcgtttgaagatagtgccactctggcggccaccgaacgttatcaacaaaccgtgcgggccgaagcgccgtggttgccgaataatgttgatttcattcaacgtatcaatgggttatccagtcgtgagaaagtgaagcaaatcctgttcgcctccagctatctgattctgggattgggagatgtgtatctcggcgccccctgcgccgttcctcttgatcctcgtcatcgtttactcagttccaaatataaccccgcgcgaacctggacggcggaaggcgccgtcggtatcggcgggatgtatatgtgcatctatggcatagattctcccggtggctatcaattggttggtcgtacgctgcctatctggaacaaattcctaaaaaatgagcaatttggtgatgaaccctggctgctgaaattcttcgatcaggtgcgtttctatccggtaacggaagaggaactcaccgcgtttcgccgcgcttttcgcgaggggcgagcgcagatacaaattgaagaggttgaattcgattttgccacttatagccgatttttgatggaaaacgccgacgacattgcggcattccgccagcgtcagcagcaggcattcaacggggaagtggctcactggcaggcacaggaaagcgcagcggtcgaaagcgccatgctggcagaggcagagataaccgaagacccggatggtcatttggttagcgccgacctgaacggcaatatttggaaaattctggtggaaccggggcaatgggtgaagcaaggagagccgttgattgtcgtggaggctatgaagatggagctgatggtcgtctcgccctacgacggcacagtgatgcgaattcactgccagcaagggcgggcagtcgagccgggggatgcgctgctgtggctggatattgccagttgaagatgcgtgttattgccaaaatcggagactccaaatgatgtcgaatgccagaaatcagccacggccggaaggaatagctgaacgggtttaccgcttactgaagcaggaaatcttcgattttcagctattacccggcgatcgttttagcgaaaacgaagtggcggtgcgaatgaatgccagccggacgccggtacgtcaggcgctgtatgcgttggaacaagagggctacgtggacgttcaaccgcgcagtggatggcaaatcaaagcggtggatttcgattatctggaggcgctgtacgacctgcgaattgtgctggagctagaggcggtgaaacggctgtgcgccttatcgtcggccgtttgcccgccgcagttacagcgcttgactgaattctggatcgatgacccacagatgccgaaaggcaaagatgtggcgtctcaggatgaggctttccatatgacgctactggatgcggcgggaaaccctgagatggcgcgggttcatcgggatattaccgacaagattcgtattgtgcgacgtctggattttactcagcgctcgcgcatcagtgcgacttacgccgagcacggtcagattctgctcgctattttaaaccgccaactgcaagaggcgcaaaatctgttacaccgtcacatttccgtcagtcaaaaagaagttcgtcaaatcacgctccacatgctgcatcaggcgcggcaggagaaattgggttaattaaggctctcagcagacttttcaggggtgactgctatgcaacatcgtatctttattaaagcgttggcgttatccgcatcggttatcagtctcgggctggcttttagcgctcacgccgtcgacaccatcaaagtgggaattatgcattccttgtccggcaccatggccatttccgagacgccactgaaagacgtggctttaatgaccattgacgagatcaatgccaaaggcggcgtattgggtaagaaactggagccagtcgtggtggatcccgcctccaactggccgctgttcgcggaaaaagcccgccagttgctggctcaggacaaagtggccgtagtctttggtgcctggacgtcggtgtcacgaaagtcagttctgccggtatttgaagaactgaacggactgctgttctatccggtgcaatacgagggggaggaaatgtcgccaaacgtattctataccggcgcagcgcctaaccaacaggctattcccggggtggaatacatgatgagcgaagacggcggcgcggcaaaacgtttcttcctattgggtaccgactacgtttatccgcgcacaaccaacaaaattctacgcgccttcctgcatgctaaaggcgttcaggacaaagatattgccgaggtgtataccccgtttggctacagcgactatcagaccatagtttcagatatcaaaaaattctccgccggtggcaaaaccgcggttatttcgaccattaacggcgactcgaacgtgcctttttataaagagctggctaatcaagggctgaaggcgacggaggtgccggtggtggccttctcggttggcgaagaggaactgcgaggaattgataccaggcctttggtggggaatttggcggtgtggaactactttgagtcggtggacaatccgatcaataaagcctttgtgtcccaatggaaagcctatgccaaggcgcgtaaattgcccaatgcgagcaccgcagtgactaacgatccgatggaggcgacatacgtaggtatccatatgtgggcgcaggcggtagacaaagcgggcagcaccgatgtggataaagtccgtgcggcaatggcagggcaaaccttcaaggcgccgtcgggctttacgctcaccatggatgccggtaaccatcatctgcataaaccggtcatgatcggtgaaatcgaaagtaacggtcagttcaacgtggtgtggcagacggataaacccgtgcgagctcagccgtggagcccgttcattcccggtaacgataaaaaaccagatacgccggtaaaaacccgcgcccactgattttgtcaccgccaaactcgtccctcccactgtgggagagggttatcctttcagggagaacataaccatgacacctgctcacgtgttccgatgtctatttttggtcatctggctactgccctgttgcgctaaagcgggagacagcgaggattttgcggtggcgaaccgtacccagcaggcgaaattactgcaaagttgggctgcggcaccgcagaaggttcgcattccgttgctgaaggcgttagtacaggaaaaactggtggtcgatcggcatcagcggccctttagcgaaacgggtacggctttgattccacttggtgaagccaaaacgccggtgggggaaacccataaagtccgtctgactaaccgcctacgggtattggcgaggagcgcgctggcaactcatcaactgatcagtgacagcgccaatgacagattgaaagcggcgctagccttacaaaaccacgccgattctgaattattgccgctattgcaacagcgtttgcgtctggaaagcgacggcggtgtgcgcgatgcgctggaggcggcgctggctcggttgcaactcgccagtccggatgccgcaatacgactccatgcggtaactttactgggatattccagcgttccttctgcacaggcatggctggaacctttggctgataagcagtgggaaagcgatccgaaagtgcgtgccgctgccgccgacagcctgacgaaaatacactatcggttgaggctgggagatcttctcggacaggtctttatggggctttcgctcggctccattctactgctggctgcgttgggactggccattacctacggtttgttgggcgtgattaatatggcccacggcgaaatgctcatgctaggagcctactcggcctggctggttcaggggttctttcaacaatttgcgccccactggctggcatattatccgttggtggcgctacccgtggcctttgtgattaccggcggtattggcatggtgttggagcgcaccattattcgtcatttatacggtcgtccactggaaaccctgttagcgacctggggtatcagcctgatattgattcaggctgtacggatgctgttcggcgctcagaacctcgaagtggccaatccggcttggctgtccggcgggattcaggtattgccgaacttggttctgccgctgaaccgactggcggtattggtttttgtcatgctggttttactgttcacctggctgctgctgaacaaaacccgattgggcatgaatgtgcgagcggtgacacagaatcgtgcgatggcggcctgctgtggcgttgccaccggacgaatagatatgctcgcttttgggctaggttcaggcatcgcgggtttgggcggcgtagcgctttcgcagttgggcaacgtcgggccggagctggggcagggctatatcattgactcgtttctggtggtggtgctcggtggcgtggggcaactggcgggtagtgcggtagccgcatttgggctcgggtttttcaataaaattctggaaccgcagattggcgcggtgctcgggaaaatactgattctggtgctgatcattctgtttattcagaagcgtccacaggggctgtttgccgtgaaagggagggttatcgactaatgagacagccaatcatgtccgccattgcccgtaaagcgccgcggagtatcaaattactgggcagtttgatggttttactcatggtggcactgccgttactcgcactgttaccgaatattcacccaatgaatatttctacttataccctgatgctggtgggcaaaattctttgctacgccatagtggcaattgcgctggatttggtttggggttatgcgggattactgtcccttggccacggtattttcttcgctctgggggggtatgccatgggaatgtatctgatgcgacaggcggcgggggaggaattaccggcgtttatgtcctttctttcctgggatcacttgccgtggttttggtggggaactcagcattttgcctgggcgatggcgctgattgttttggtgccgggattactggcattggttttcggattctttgcctttcgctcgaaaatcaaaggcgtttatttctctatcatgactcaggcgctgacctacgcgggcatgttattgttttttcgcaatgagacaggtttcggggggaataacgggttcaccgggtttaccaccttactcggaatgccaatcaccgcaacgggcacccgcattgggttgtttattgccacggtattgctgttggtcggcagtttaggcatcggttttatgctggctcgcagtaagtatggtcgggtattaacggcggtgcgtgatgcagagaatcgcctgatattttgtggttacgatccccgaggtttcaagctgctggtgtggacgctttcggcagtgctatgtggcctggctggtgcgctttacgtgccacaggtgggcatcattaatcctagtgaaatgtcacccactcattccattgaagcggcgatttgggttgccttgggcgggcgcggcacgctgattggcccggttatcggcgcagggttggtcaatggagccaaaagctatttcaccatggcggtacctgagtattggcagttattcctcggttttatctttatcgccgtcacgttgtttttaccgcgcggcgtgatggggttattccgtaaaggagacaaataatgcaacccgacgaaccgctgtttacccgccagcatttggccgatcgctatcgtgagcaaacggacccgattctacagctggaaaatattaacgtcagttttgatggttttaaggccttgaccaatttgtccctcaacattggcgtgggggagttacgctgcgtcattggcccgaacggcgcggggaaaaccacgcttatggatgtgattagcggtcaaaccaagcctcaaagcgggcgtgctttttacgatcagtctaccgatttgacgagtcttgaaccgatagatattgcgcaaaaaggtatcggccgcaaatttcagaaacccacggtgtttgaggcgctgacggtgtttgaaaatctggaaattgcacagaaaagcgataagtcggtgtgggcctgcttgcaggcaaaactcagtggcgaacagcgggataggatcgacgaaatgttaatcacgctgcggctatccagggagcgcatgcaactggctggtttgttatctcatggtcaaaagcagtttctggaaatcggcatgctgttggtgcaagaaccgcatttattgctattggatgaaccggtcgccggaatgacggatgcagaaaccgaatataccgcagagttgtttcgctccctggctgggaagcactcattgatggtggtggaacacgacatgggatttgtggaaaacatcgccgatcatgtcaccgtgctacatcaagggcaggttctggctgaaggttccctgcgagaagttcaggccaatgaacaggttatagatgtttatctggggcgctaaggagcaaatatgttgcaggttaacgaactgaatcagtattacggcggcagtcatattttgcgcggcgtctcttttgaggcacaaatcggtgaagtgacttgcttgctggggcgcaacggcgtgggtaaaagcactctattgaaatgcctgatgggattgctgccggttaaatctggcagtattaactggcaacaacgcaatatcactcagcgcaaacctcaccaacgagttcaggcaggcattgcttatgtgccgcaggggagggaaattttcccacgtttaacggtagaagaaaatctgctaatggggctatctcggttttctgcccgggaggcaaagcaggtacccgaagatatatatcggctgtttccagtgctgaaatccatgcaatatcggcgtggcggcgatctttccggaggtcagcagcaacaactcgccattggtcgagcgctggcctgcaaaccgcagttgctaatattggatgaaccgacggaaggtattcagccttcggtgattaaagaaattggtggggtgattaaacagctttcatctgagggcaatatggctattttactggtggaacagttttatgattttgccgccgaattggcggatagctatctggttatgtcgcggggatcgattgtgcaacagggaataggcagtgaaatggcgcagcagggcgttcgagggctggtagcgatttaaatgtcttcttaattgaatgcgaatatgtgaatcacaaaggattgaatcattcccaatgagggggacggaaagtaaagacagtgaagtatgagttcagtttagttatctgatgagtaaaactatcatttgcaggcaaacctggcgatggtcgatctctaatataatattactgagtttaatttactattctggcgctagtgtccaatgacgcgcgtatctcatactgagaatcaaatacaaacgcagatacaattcaccggtttactggaaatcagattattgtgcgggaaaatgttgttgcgcattgctacaactatgaataccagattacctgataatcatgcgggtgaagtgaggttacccggaaaagttgcagctatacggattgagatgaaattatattagccctagctgaaaatttcttattgatgaatggaggatgaaaatcgagcggaatatgcgttttttttcggctagaatgaattgatattgataatatggttcgttattgcaacgattaagacgaagcgattaacaatttatttacatgtattattaaatgctacagaagccgaacttgcacaaacgaatgtacttctgtaacatttttctttgttatagatatttttttccctggtgttggctaatattgccccctgactacgtactacgtgtagtcaggttttttttatcacccaatcactaagtttcaaattatacagatgcagacgcgatgcgatagctgtactaaagtgtgatccgatactgtacttttggacagaaagaccacatgaaatttaaagggatgcagttagactttgggagaaggagaatgttttttggtgtaaaaaatgatgaaaggataattgagactctacgggattatatcgacagaaagctagccagctacgattcgcccagatatacctacatggtgattgataaaaagaatcccattgatatattcatggtgtcaagttatccaaatgaatgggttgatatctaccgaacccaaaactaccagcatatagatcccgtggttctgacagcgtttaaacgcacctcaccgttttcgtgggatgaaaatattaccatcctctccgacttgaaatcatccaagattttcgctttgtcgaaaaaatataacatagtcaatggatttactttcgtgctgcacgatcacatgaataacttggctatgttgtcgctgattatggaccatagtgatggtaaagagctagaagctcagataatcaatgactcagagcggctgcaaatgtgtctgattaatattcacgaacagatgctgatgcttggacaaagtacggtgcgtactacgaatgggaaacctgcggacatcacgagtaaagccattttctctccgagagaaaatgaggtgcttcactgggctagtatgggtaaaacctatcaggaaattgcgctgattgcgggcattacgccccgaacagttaaacatcacatgggcaatgtggtgaaaaagttaggggtgattaacgcccgccaggccatcaggctgggagttgaactggaattgattaagccagttctgaaataacgggcagcgaaattggccatgctcgtagcgctgagtctggcccctgtaaaaatgcatttatctgcgatgccatcaatgcctgattgtgtaagtccgttgggagattgagtagataaatacgttctttttcgctgacgaatgcttctttaataatctctatctgccagccagagcgtttaagtatggttagcatggcgcggctaactatagtgtaaatacccgtatgaccgtggtgccgggtataattaatcatggcaaggaagagcacatagcttataggatagcggttacctaaaagcaactttgcacgggttttatcaacaaaaaatcggcttgattcgatatagttattgtcaggtaaggtaatatcgtcgaagagagcgttaaaagtatgagttatcatattcggccggttcaactcaataaaacgcacgctgcaaattagctggcttccgtatatgccgagtagataacgagtgtttgggttatcatattcgtcaaactccatgtcgttgctgcattttacagcccactgtaggcgatctttaaaggttttttttctcagtctgtaaagatcctcagaccgcatattcatcagctcttcatagctgacatcgaaaatttctaacatttaatttcctattatttaatacagttgaatttctatatagggtaataaattttatcatcagaaaagccggttgtcgcgatcaggaatagcgctttatctatttcttgcttatcggcacaatcgggtcaatataataatattttttattagcggagccgcagtcgatgaaccatcgaggcgatgcaaaaaaccgcgtgtttacctgtttcaccgttgatttgtcgccatacgggcattaattctgatgtttatttcattgcccaacggcatgatggttacccatatggttaagtttggcatagacaaatagaccaaggttgatatcaccctatttcagaggttatggcaaagctttacgggcagtaccattacgacgtatctgaaatattagatacgattggtttatctcacgtccatcgcaaatacaataacattggtctgcgatgagctaaacgaattttacaaagctagctgcgaataaaattgttactgaaatttgttgctacaatgtatcaaaatttctcctgcgatagggagcggcaccgccaataataaaatattggccggtattatcgctattccacccagacgataatgagagtatatctcaccccatattaaccaaagctataccattagcgcacgccatgcataggataaaggcacgacgaacagtaatgcgggtaagaaattaactacggaaaatatcttgatctgggcaatacgtaatccaacggcgatcattataataccgccacaggctgagaaatcagcgaaggcgatttcatccatatagggcatgatccaaacggcgaggccaaaaagtaagctctgaagcaataattgtgggactgcgataaatatcagtgccattcccaaagagatggcaaaaatcatcgctgtaaagaaatccatcatcgatttgaccaagagtaattggtaattcccgcttaatccctcggttaaagcaccgacaattcccagcccgcttgcacaaaacagcacgatcatcgcggtataactttgcgcaaactcctctgcgggtaagggactacgcgttttgatcactttggaaagtatgcgttgtaaaaactctgcgcactgtttgactccacgttccagactaaacagttcgccaaatgttgtgcccagaatcaatgccagaacaaccgctggcatgtattgcacctttattatcatgacaacgccgatgcaaatagaagagagagcaaaaattgctggtaacccttctcgcaaacgtaatggtacatgtcgtgctaaagcaacgcccagtaagccacctaaaattattgccgcactattaatccagggtcccagcatggtatgacacctcttcattcttatattcggatttattaattctagcggaaataggtgagtaatgtggggattgctgtgctacttcgggatagatagttaattttttatcaaaatttaattatccgttggcgcagaaagcaaaaacataaatagtactaaagtaaacttggttacagccgatatttagaacgcttagttaaaaccgaatagacagttcgtctgtcgagttagaaatttaaggatgaatgtaatatgagcaatgtagacattggaagtaatgagaaaccagaccattcgattaaaaataaccgatttcgtggatacaataaatcttgggaacgtaaatttttgctaatggataagcttggctttcgcgacgataaatacagtggcgatcagactcttgctaaacagttagcctttggagatcgttttacgatcaattttaatgcttgggcgctgctgtttggatcggtatattactttatcaagggaatgtggcagaagggcttaatcattatggctgccggaatactcttttctgcttttgcaattttcctaggttatgagcgacaggcgtaccttattccatcagtggtgacggctttgatggccaatgttgatttctatcgcttaagccggtttaacgaaaagatatggccaaaattccctgctatattcggtaagattaaattttgcctgctggtattggttttttcattagtcattggcgtaatgacggtggtggccagcgaacgagccgagctagaaacatcggcctgctcggttttaactgaaattcttcaatggcagttagatagtaatgcaacctgtaagaaggtaacgatcgatgaggaagtgacggaagggttctatcgcgctcacgccgtgctggataacggtaatgaaatgcttatcacgctggagcagcgtaacaaccagatttatgtggttgtgcctgagcaataagccgtttgatatcagatgaattcactcactcagcgctcagtcagttatctcgctgagtgaggaaccgattagctttccgtcaaaggtcaagctcgtaggttttttccagattagacgactgtatcaaattaattggcatcgtaatcttccctttcctgtctcctacctgaaccaaaaatgttattgcccaatgattcttttagtcaaaatgaccgtatttttagggatcaaataagtttggttctatggcgcaggttttatggctaacactccattgaaatttgctagctgtgtactgtttcttaatctaaatacgttgataaagataaaaatctacatagtactaataccaacccgacagataatcccgtatcccgtatcccgtacccactgtaccagtgccactattatcagcgcgacgaccataagtcagaatccggcagttttgcaacctattacgcaggtgagtttattttccctgctgctagcatattgcagtaatgactcaaatcgaatgttattggatatcatggtatagccagtaatactgataaaactggtaggtaaagataaatcgactcccaacagccttaagacaaaagcgaattttctaagttggggaaataaaagcagtgagataaactgaatgagtagcgagcaggatactgtccagcggttatcagcattaattgagtcatttcttgtggtataaggctgagctcatcagcctccacatcaataattttttcttctaaaaatagaaatataagcacgtacaggtttatcaacaggcaaaaccacactaaatatgtgtatttttcatgaactaattccatttagatacaaaagtatgaagtgattatcgaatagatgaataataacgaaattgacctaacgtgtttttttattttgttggttcggatctttattaataccatggcaagccggaatggttgccaccacgagcaagattatccgatcgttttcgggcacaaggtttttgtaatgaggagatttggtttggcaattcttctatgtaaggggacttattgcataactgtgcgggatagatgtgctttcctttacattcatcagtttatacgcgaaaagataaacgatggtgttgttgggaatgataatttgatgaataatgtgccagataatcttccctgatgagatacgtgtaaatgttacgcattttagtgacccgaattgatttcctcggggatatggtctgcaccacagcattgattcgcgcgcttaaacagcattggccagaagctgaaattcatgtgctggccaataaatataatgccccggtactggatcgtaatccggatgtcgctgcggtacatacctatgtgtacagtaaacaatgtgagcgtaatcagcgcctgggaaaattaaacgctttaatagatcgcttagcgctaatctggcgtttacgtcggttgcgttttaatctggcgattgtccccaatgggggcgtgagtaaaaatagtatccagtttgtccgacagttaaatgttgccgattgtcgttggcatacagctgagagtgaatttgacgatcgggttgcgtcccacgcagctagccggccaatgaagcatgagtcattatctggatttacgctgttacctgagctagcatccattgatatcaatgcgctacggctttatgtctatcctgagccgcagttacaagctcaatggcgaaattggtttggtgataaaaataaacccaggattggattatttatttcaaataagtcggtcgatcgtcgctggagctggcagaaatggcacgatgtaatcattggccttgagtccaaaaccgagctatttattttccacgatcctgcagaaaaaccgacggatgaacaattggctcatttacccgctcgttgcctttctaccccttcggtacccgatatgatagccgccatgagtcaattagatttggtggtttcggcagatagcgcccctattcatttaagtgcagcattacagattccggttgtagcattatttgaaaaccggcctgaaaaatatttacgttggtatccattgggtgtgccgcatattttattgcgagaagggagacaggttgaggatattcaagctcaatcggttattgaagcggttagctgtttattagatagtaaaattccgccattggaagaaagcggctttcattaatctgtcagcaaacttttagccagtaacttcgacgcctcgcataatgcggggcgtttttattggtatcagtgattcctaaaatgagataagcaaaggaaaacctttggactgactaacgacttgtaaggtattaccaatactaacagtgtgattaatagtttgttttttgccagtattcactcttacgcctaagctagaaaggttcaacagtgtcttaaacataaacatggaggagttacgtttgatgcgtttatctacgttggttttagcgatgagtatggcactcgccgggcaggtccaatccgcagaaatagcggtaaaggggcagttaaataaacctcagttggaagatgaagctaatcgggtcggtcaaaatccgttctttagctcgagtaaactacctttccaggcaccgccgtttaatcttattaaggaaagcgactatgcgccggcgattgaatttggaattgccgaacgtttggcagaggttaatgctattgcaaataatcctacactgccaacctttaaaaatacctttatagcgttggagaaatcagggggaactttaacccgagtgatgaacggatttggcgcaatgacatcggccaattcaagtgatgtcctgcaaaaaatagatgaagaaacctcgccaaaactggcggctatggaagatgctatcaagctgaatagcacactgtttaatcgtattaaaacaatatatgaccagcgagataaactcggtctggacgatgaatcgagacgtttggtggaagtgacttacactaacttcattctggcaggcgcgaatctttctgatgcggataaaaccaaacttaaagctttaaatcaggaagcggctggtctgagcactcaatttaccaataaacttttggctgcaaccaaaaacggtgcggtggcagttaaagacaagtctgttttagcggggctgtcagagggggaattagccgcagcggcgcaggctgccggcgaccgtcaactggataaacaatggctattggtattgcaaaataccacccagcagccggtgctaaaaaatcttagcgaccgagatacgcgaaaatcgttgtttgatgcatcgtggaatcgagccgagcagggggatgccaatgacactcgccagatagtatctcgtttggcaaaaatacgggctgaacaggctcaactccttggtttcccgaattatgctgcttggaaattacagaaccaaatggcaaaaacccctgatacggcactgactttcatgcgtgatatcgtaccggctgcgaccgcacgtgccgagagggaagcaaaagatattcaagcggttatcgatcgtcagaacggtggatttaagctggggccagaagattggaaattctatgcggaacaggtgagaaaagaaaaatatgatctggatgaatcacaaataaacccctactttgaactggacaatgtactgaataacggcgtgttttacgcggcgaatcaactgtttggtattagttttaaagaaaggacagatttgccggtttatcatccagacgttcgggtttatgacgttattgataaagacggtcagcctttggcgttgttctacaccgattatttcaagcgtgacaacaaaggtggcggtgcctggatgagcaattttgtcgatcagtcgaaattgttaggtaccaaaccggttatttataatgttgctaacttcacaaaaccggctcctggacagccagcattgctgtcatatgacgatgtcattacgctgttccatgagtttggtcatgccctgcatggcatctttgccgatcagcaatacccaagcctgtctggcaccgcgacggcgcgagatttcgtcgagtttccatcacagttaaacgaacattgggccagcgatccaaaagtgttcgccaactatgccaaacattataaaaccggcgagccaatgccgcaggagttagtcgataagattcagaaagccaaaaaattcaataaaggttatagcatgaccgagctgctttctgcggcattgctggatatgaactggcatatgctaaacgccagtcagctggagcaggatgttgataaatttgagaaaaaatcgttacagcgagataaaattgatctgagttatgtccctccacgttaccgttccagttatttccaacatatctggggtaatggttatgccgcaggttattacgcatatttatggactgaaatgctggccgatgatgcttttgttggtttattagaaagcggtgggctaacgccggaaaatggtcagcgcttgcgtgataaaatcctatctcggggtaacagtcaggatctggaaaaactttatattgattggcgcggccaagctccaagtattgagccaatgttaatcaatcgtggtttgaaggaacccgctaaataagccaatcttgtaaatagctaattggggaatcaacattcttcgttatagccagtgatttatgttcctaccgcggggcagtttgtatcagattgccccgttctatctgtcagtacatttcatccgcatatatcagccgttgcattgaacaatgagatgcggatctcatagctcgaatccgtccattgaatgaacaacctcattaccttaatgtacactcgttttctatttattctctcatatttagttgctaacaaaactactctcacgctaatagtatgtttgtggatgctactttcccctagctatattattttataaattccactttggttaatatatttacctgcatttatgcttatttgaagcgtatggcgttaaatcggggaaattaactaaaggaatacaatctacctccgataagcacctcatattattactctaggggtttgtttttaatgtttaaaaaaatgagaataagtgttggcttatctttgattatttgtgtgtttagccttgcgctgcttggggtgagtggttttagcatgcaggctttaaccaatagtaaaggtgcaacgtttagaattgaccgtattcaaggcgatcaattggtgcctttatatttaatctattctgagttattaaatacccgtatttacgcgcaaaatgccgcattactgttggaagcgaaggcagacgccggggccgatttattgaaggcacaggattatcttaaatcatctgaaaaaaacatggtcgctttaggtaaaattgtgtcattgaccgcagaagggcggcggttacgtaagaatattgatacgacttatgctgattacattaacaatggtatcaaaccaatgatgcaaacattgcgtgatggtaatgtggctgcttattacaatctaggaccgagtgttgttcctaaaagtgaagctttacgcaatagtttgtctgagttcgaaacttttgcaaaaaatctgggcgaaaaagaaatcgagggcgtaaccgcttcttatcgccaaaatatgtggattattggcggggcattgttgttgacgttaggcttaatccttatggccatcagatttgccaaacagattattttttccccgattaatgaagctcgccagctatttggaaagatatcccgaggtgatttatcgagtgttattccgttacagcccgctaccgaaatgggagggttgctaaccgcgttagacgatatgcagcaatcgctgaagggtattgtttcaggagtgagagaatcatccgccgttattactattgggacgcggcagatatccgccggtaatcaggatttctcatccagaacggaagagcaggcggcttcgattgaacaaactgccgccagcatggagcaactgacttcttcggttaaacagaataccgacaacaccagactcgtcacggcgatggcggataatatggcagtgttggcgcgcaaaaatggagaaaatattaccgatatcacggcgaaaatctcagcgattaacgaaagctctgagaaaatctccaatattattggcgtgattgactctatctctttccaaaccaatattctggcgctaaatgccgccgttgaggcggcaagagcgggtgaggcaggtaaaggttttgccgttgttgcctccgaggtgcgtaacctggcgcagcggagtgcagtatcagcaaaagaaataaaagagttaattgaagactcagtcagcaaaatcaaagagggttctgatatggcctcacagtcgggtgacgatatgaaaaccctgctgaatgaggtcgatcaggtgaagagcttgatcgacagtattgcttttgcgtctgacgaacaaagccgtgggattgagcaggtcaatattgcgattgtgcagctggaagaagtcgcccaacaaaatgcagcattggttgaagaagcctccgctgccacgctatcgctcgctgaacaggccgatactttagacgcttcgatgcaggtttttaccttaaccaaagcgcatgaataaccttcgctattagttttatcgaaaaatctgaccgccttatggcggtcatgatcattgaaatcggcgggctgatcagaggggcagttttaatgaatctcaagtagggttccaatatttttttgaaatttatctgtattttttaattgattaacgtcaatgtaaagtctaataatgatttataatatgttgtttatttattatttcatgcttggtatattgttagttcattacttatttccctctatcatgccattttaattcctgccagtaactttaattacataacgcctaaataacttatttaaactaaacttgtcgattgtttcacaattacgttacacgtttatttaaatgctgttcttttcgtttttttaaagtgttagtttatctgcaagttgacaccagggctaagtgggattttattgagtgactgtccgtgagatgttttattgtctgacaatatacgatgggatgaaatgaaacctcgtagccgtttcctatcttatccaggaattctaataatagcaggttaaaatgaaaagaataaatcaggatgtaatttgttctaatagtgaagcaactgaaagcaatgggaccaaaacactttccatgaagttattcggtggtatttcaaacagggatatcaatgcggtacctttggctttattcattgctattgctgccattgtcgttacgtcatcttattctaatcttttgccaaaaaacatgattggcggcctagccattattatgacgcttggctttattctgtctcacattggtcgccggattccagtactgaaagatattggcgggccagctattctgtgtctgatggtaccttcggttctggtctattttggcgtatttcagaccaataccttagataccgtacatctgttgatgaaagaggccaatttactgtacttcgttattgcctgcctggtcgtgggtagtattctggggatgaatcgcgtagtactgattcagggcatgatgcggatgtttattcccttggtagtgggaactctcgctgcggtggcttccggtctgctggttggaaaactgttcggctatagtttctatcacacattcttctttattatcgtaccaattatcggtgggggtattggcgaaggtatattaccgctgtcattagcttactcggcaattttgggtgagtctccagatgtgtatgtggcgcaattggctccagcggcagttgtgggtaatattttcgccattatttgcgccggagtattggccagaataggctctcgtcgtaaagatctgaatggtgagggtatgctgattcgcaatgcagaagacaatgcagtatttacttcacaagaagggccgcaacaagctgacttccaattgatgggcggcgggttgttaatgatttgcgccttctttatcgttggcggattatttgaaaagctggtgcatattccaggccccgttttaatgattctgattgcagttctgtgcaaatactgtcaggtcattccggctaaaatggaactgggtgcgcacagttgctacaagtttgtttcaaccactttggtttggccgttaatgattggtttgggtatgctgtttgttccgctggaaagcgtcgttgcggtattctcgtttggttatatcgtagtgtgcggtgcggtggtgctttccatggcaaccattagcttctttattgctccgtatctgaatatgtatcctgtggaagcatccattgtaaccagttgccatagtggactgggcggtactggcgatgtggctattctttcggcctctaaccgtatgtcattgatgccttttgctcaaatagcgacccggattggcggggcgtcaacggtgattggtgcgacgttattattaggatggattgcctgattgcaggagtgaaaaagccaccggtgctcaatgtaaccggtggtttttgctacataggggttattcgcagtattgctgcaatgccggaagctggtcaggcattaatcggtaaaggtatacggggcgccctgtggcaccgtagagaacgtgaatactcaatactgccgtttctgacaagaagatgagatatttgcgacaggatactcgagatacaccaatagcattggcgagttgttctgtggagaattcgctggtctggttagccacaatccattcgcacacggtacgtaaagtctgactggtcaatcccttaggcagttttttccgctcaccggtattacgactgtctcggcgcaatagtttatctatatctgattgggcatagttatcgcgctgttccagcaggcgatgctgacgtcgataaaccgacagcgcctcttcaaatcgggcaaactggaaaggttttatcaggtaatcgaccacgccgtactgcagggctttctttatggtattgacgtcgctcgcagaggaaataacgataacgtcggtgtgctcgctaaattcccgcagcgtgggtagcaagtctaacccgttatcttgccgcatgaaaacgtctaaaagtaccaaatgaatcggcgtttcggattgcattagcctttctcgcgccgcctgtagcgatgacactaccccgcaacaggtaaatccattgacctgacttaaatagcatttattcagctcggccaccatggcgtcgtcgtccactatcaacacattaatcatgatttaccgcactgattttataagggattttaataaagaactgagtgtgacttcctgcctcagactcgaattcaagtgtaccacccacggcttctaggcttcgttgtaccagtgttaatccaataccgcgtccatttccttttgtcgaaaagccttccttcaggatctgggattggcaatcaaccgtaatgcctggcccattatcactcacttcacaatgcaagatatcgtcgaccagatgaaagctaacgttgatttctttctgcggcatatccgacatggcatctaacgcattttcaatcaaattgccaagaacagttattagtgtggtggtggtttgttcatctgcagtatccggcagacggctatcttcactgaccagcaatgtaatatccatgtcccgcgcccgattaattttcgccaacaggaagcctgcgatcaccggggattttattttaaatagcaaagagccgatctcttcctgataattatcggccgttttaagaatatagtcttctaactgcggatagtgtttcatatgcagcagaccaagaataacatgaagtttattcataaattcatgggtttgtgttcttaatgcgtcggcataattgaccatgccggttaaacgttgcatcaaatggctaatttcagttttatcgcggaaagttgcaatagcgccaatgatatcgccattcaccaccactgggacggtattggccagcagcatactgccgttgaaatctatttcctcatcgcggcgagcaatacccgtggtcagcacctgttgtagattgaggcggtctggccaatatttgctggcattatccaacagaaggttttccaacggaccattttgcttaaacaagcgtttggcttcgtgattgaccagagtgatgcggcaatcagtatcaacggcgataactccttctttgatcgattgcagcatggcatcacgctgttcaaacaaattggatatttcgtagggctcaaaaccaaacataattctttttaaggctttgactaaaaaccaggtgccgaggctgccaacaaatattccgaatagaatcgtccagggaacgctccaaagattttcatgaataactgattggatgttgagcaacgaaatgccgacggcgactacgccaatttgctgatgatttgcatcataaacaggggtgaaaatacgtagggctggcactaaggttccacgattaatcgcgctgctttcttccccaagcaatgcgggttgcagatcgtccccaataaaatgtcgtccgatcattttagtattagggtgcgagtaacgaatgccgtccatatcggtgacgacgataaataatagttcgttgctcttactgacgctttcagcaaagggttgaattttatccttatcctcagtgtgacttaatccattgatcacaataggggataatgcgagagtacgagcaaccgcaaaggatttttctttgagattattctgcgcaatatggctgatttggataaaaaacagcgtgtgtactgccaatagaaccgaaattataaccacagaaaccataagtgttactgaggtgccaagccgcagcggttttttttgcctgcgcgccggttttacaacgtccatgccatgctccagagatatccatcagaaaaacccttctagagttgatagatattttatgaattagttcaaactattagattaataccaacgagaaaaataagctgtgatgcaacacgagataaagcggggatgagaaaaaaggtgaaggatataaaccgcgatctgaccataactagccatcttccgtgacgctctgaatccactgctgtaataaggttaatgatttttcaagattatatcacatgaaatatgtgatgatgaattaatttacttacttaaccgaattattgcttagatatcgtcatttgcattataaaaacagcggcttgtcagttttgggctaaaaagtcaggggcgtgaatacactcagcgtttaattattattacttactcatattcgccagacttaaatttattatatttcattagttttatagtgataaaaatttattaaataaattaggtatgataattattatatagaagtggtatttagctatcatgcgccatgagagctttttgaacaacagagactagatggatgtgtatatggttttccccattaattgtagtgacgctggattactcttaagcaggttttctgagtgtaaaagagtgactgaaaagagtagcaaccaagcagaacccacggcccagcggatagttgttggcgttttgttttatcctcctgttcctgtttacccctgaccgttggcaaaaaagtaccgccgtctgaaacatttcatggaatgactctggctgagaaaccattcatttaaacaagatttagaagaatccaattcataaaaataaattgggtctttacgcttcaccatgatgaaaatctataaggaacccttttctacttaatatctgcaacgtgcccgtaagataaatcacatgaatttttggagcaataatgacttttatgaaaggacgcttagggaaaataaatttaattttacttattggattatctatttggttttatcccacacccgcaacggtagaccctaaagcctgggggttaatggctatatttaccagcaccgtcattggattgattatttctccttatcctttaggtgcgatggcgatattcagtttgacactatcggttgcgaccgggctagttggaattaaagatattctagccggttttggtgagccgattatctggatgattgcctgtgctttctttatttcacgagggtttattaaaaccggttttggcagacgagtgggctatttctttatcagtaaatttggtcacagttcactgggcctggcttacggactggtgctgaccgatctgatattcgctccagccatgccgtcaacgtcggcaagaagtggcggcattgtcacgccgatatttcgctcaatttctgaagcttacggttcgacgccagaaaatggcaccgaacggcaaatcggcgcttttctcattcaatgtgtcttccaatgcaatgcgataacctgcgcgatgtttttgacgtcgatggctgggaatccgatgatcgccaaattagccagcgaaatgggagtcacaatcacatggggaggatgggcgttggccgccagcgtaccagggctaatttctttagtgattatcccattgttactttaccgtttttacccgccggtattaaaaaagacgccggaaatgagagccattgcctgtgagaaattaaaagaaatgggggcgatgagccgccatgaatggattgttttgtgcgtgtttatttgtctggttgctttgtgggttagcggcgctacgctgaatatcgatgccactttaactgcgtttattggattaaccgcgttactgttgaccggaactttaacctgggatgatgtcgtggcagaaaaagaagcctggcatgccatgatctggttctcggtattattaaccttggccagccaactgaataagttagggttgattaaatggtttggtggaatcgcggctacctgggtggatggcatgaattgggttcccatgctgggagtcttattgctggtttactattatatccactattttatggcgagtgcgattgctcatatcagcgcgatgtacgccgtgtttgtttctattgctatctctgcgggcgctccgccaatgttgagcgtactggtctttggtatttttagtaatttatatatggctacaacgcattattccggcgggcctgcgccgatcctctttggctgtaattatgtgccattgagtacctggtggaagattggattcctgctcagtctggccattattcctatttggttgattattggcagtttatggtggaaaaccatcggctactggtaatccgattatggtggaaaaccatcggctactggtaatccgataggttttatacgttcagggccgatattgatcaataaaggccctcaaccagcgaaaaatatggcgcacagggtatcggctactcggttatgtggcccggagcacgatcgccagtcttcaggcaattctggtatccttcattactgaaacggttggcatcaaggttaagggagtattcgcaggggaggcaatgagatgttggcgcggaaggggattccgtcgccatagccggtggagagaaacgggccaaaactgcggccaacatttgatagagtcttttcattcttgttaccctcatgatgatctcggtgaatgataggttagttacgtcctgtaatgataaccattatcaataataatcatagagcatcatttatccaccttcaaaccctaataaggaatcgtaatggaatggaatattgcgcgttcctgatgatgtttcctttctcagttgggacataaaacttaccagagcgccaccgacgtgccgcgtcatcttctggtaaacgttcttttctacggattaaccattcggtttttcacactgtattagcgattaattgacgttatttcagaatgtatccagagatttcatcttcagtcttggagaaaaaaatacccctgaaataaatgtatataaaaggtattccattccaaatgagaattgtattgataatcattactgttatgtataataatgcattcaacatctattaggttggaggtagaaggtgtcaaatacagagaatttaattacaccttcacctgtaggggtaatagcagatatcgcgcagctctttgagcaaacctttgctcatttttctgtaacgtttaaagtgaattccgataatatcccttccaaaagtatgagtttcaatcattggtcaaatgaagataattttccgtcactgatggaaatttatcaaaatgagtattacggcatcaataatataaagccgaatcagaaggcactttattcactatggacacaatggtatttcggtttggttattcctccaatgatgttgttattaatggaatatccgcaggaaattgactccgactgtcgaaactttaaagtggaatttcatgatagtggcaggccagatattatttactatcagctaaaatggaaaggtcagagcgcggaaaatttactagaacgctattatgcactgattaataaccatgttattccaatagctaataaaattgagtcctatcagggtataaacgggagattactgtggaataacatcggatacctgatgtattggtatctgggtgagtttaaaaaacgcatgaaagaagatgtttatcagtctgttattcaaggtctttttatgactatgaccttgccagacggccgcgaaaatccgctttatcgcacggttatactacgtaatgacaccctgcagcgccgtagctgttgccagcgtaataagctaccgggcgtgggtaattgtcatgattgtccgctcgaaataacgctataaaggtattatttattctgaaataacctcttgcttctggccggtggtttttgtagtgactatttaactctctcttagagttgtcgactatatacccagttatcattgcttataataaaaatatcatggaacagtaatctgagcgcatctatatatattataaggatatatcatgtacggagtagcccatactgaaaccccttttttatcggaaagtggtgatataagtgaggtgctttatttggggagctttctaaataaacaaagtgccgataattatcaggaaggagttaataatgtcactgaaagaattaagggcatattaaacgttgttgataaaccctttagcgggatattaccgaatgaattgtcaccgcttatttctggaataaacctggataatccgctgccctcactcgattctgcgctggatgaattacaacagctgtatattaaagatgctgtttattttcatcatcctaaatatgtagcgcatttgaattgccctgtggtgctgccggcggtgtttggggaaagtattattggtgcgattaactcctctttagatacctgggatcagagcgcaggtggtacgctgattgaacagaaagtgctggattggacccgagataaaatagggttaggtgaagagggggatgggattttcaccagcggcggaactcaatcgaacttaatggctatgttactggctcgcgatcatttttgccatcagcgagacccggcccataaaaatcaattgcagggactcccagccgattttcacaaattccgcattttcacatcggcggttagccacttcagcacgcaaaaagcggccgcattattaggcttgggttacaacgcagtggttcctattccatacgacagtgaatttagaatggatactcacgccttggagttaagtatcgaacgctgtctggcacagggaaatatccctttagcggtggtggcgaccacgggaaccactgattttggcagcatcgatcctctacgtcctattgcagcgttagctcagcactatggtctttggctgcatgttgacgcggcctacggttgcggcttactggtttcttcccagcatcggcaactgctcgccggtattgagatggcgaactcggtgaccgtggattaccataaatcctttttccagccggtgagctgtagcgccttctttgttaaggataaacagcatttttcctatttgacctatcacgccgagtatctcaatccgttaagcgcattacaggaaggaacacccaacctggtgaataaaagtatccagaccacgcggcgatttgatgccctaaagatgtggctgacgctgcgtattatgggtgcaaagcaattggggctggcttttgagcgattaatggagaccgcgcaggtcgcttatcaattaatgcagcctaacccgtattttgaactgttgcatcgacccacgttgagcacgctggtattccgttttataccgctggattcccgcagtgatgcagaaatcgatctcaccaatgcatatattcgtaaggcgttattccgagagggaaattcggtcattgccgggaccaaagtcaatggccgtcagtatttaaaatttacctttctgaatccgactacggggattcagcatttaaatgaaattatcgatgccattatgacccacgggcagaactatgcggatcagcatcacgtcgccgcgctaaacaaggaatgattatgtccatgcgaccttatgattttattgccatcggcattggtccttttaatcttggattggcatgtttaacccaaccgctgaacgatgttcatagtttattcatcgatcaaaatccgggttttgactggcatccagggatgatgctggaaagtgcaactctacaaacgccctttatgtcggatctggtgacgttagcgtcgccaacgcacccgttgagctttttaaattacatcaaacagcagggcagaatttattccttctatattcgggaaaatttctttctgatgcgtaaggaatataaccaatattgccaatgggctgccgcgcaattgcctaacctgcgtttcaatactcgggttgaaactctggagtatgatgaggaaaccgcactgtataagctgcgttgtctggatttgcgcaccggcgattattacgaatgtcagtgtaaaaaattggtattaggcactgggccatcgccgtgtattccagaatgctgccaaccttttatcgcgaaaatggtgacttctggcgattatctggataacaaagcggccttgcagaagaaggcctctattaccttgttaggcagcggacagagtgcggcggagattttttacgatctactcagtgatatagatcgctttggttatcaactcaactggctcacacgttccccccgtttcttcccactggaatacaccaagctaacgttggaaatgacatcaccggaatacgtcgattacttttataacctcccggcagaaaagcgcgatgagctgaatctgactcacaaacaattgtacaaaggcattaatagctcgttgatcaatgacattttcgatctgctgtacaccaagcgtttggacggtgtcctaaatgtgaatttgtataccaatagcgaattacagctggtggaggaaaatagtaatggcaaaggactgagtctgtctttattacagcatgaacagaatcagccgttcactttggcgtccgaaagcgtggtattggcgactgggtatcaatatcagccgccgtcgtttattgaaggtattcgccagttaatccgttgggataataaaggccgatacgacgttcagcgcaattacagtattgatcgccgcaacagtatttttgtgcaaaacgtcgagctgcatacccatggttttgttacgccggatttgggaatggcctgctaccgtaattcctgtttaatccgcgaaataaccggagttgaacattatcctattgaagaaagcattgctttccagcgtttcagcgtgccagaacagggagtcacacaatgacgcaggcgacggcgaaaatgaacccactgacgccagtggaaagcggcgatttcacactgcgacctttagatttgatgcaggatattggctggctgagtcattgggtcagtcgcgaatatgcccagtactggggaatgcaaaatcatagcgagtcacaggtattggcgttttatcaggaattactcgaccggaagccgggcagcgtattggttgggatgaaacaccagcagcctgcctttttgctggaacgttatctcgccaaagaagatgtcattgctgaatattatccggcgctgccggacgatgtcggcatgcatattttagtcgctccgccggtaaataaagtggcaggtttcacttggcgtgtatttcaaagcattatggcgtttattttcagcgatccactggtggcgcgtattgtagtggagccggatgtacgaaatgagaaaattcatcgcctgaataaactcgccggttttgtttatcagcaacggttagaaatgcctcacaagacggcatggctggctttttgcaccagagaacaacatcaacttgcgcttcagtctgcgcgtcaactggagcgtcaatgatgatagccaactccgtcgttgccattcagccccacgggttagccgtggcgcatttgcagccgtcactatggcaaaaagtgaatcgtttgcacttgtgtaaagctatttccgagttttcccacgagcgcatattcgctcctgagatattaatgagtcgacaggacggtgagggttaccactcttaccaactggctacgtcagataaccggattcgttacgttttccgcgcccgccggttggcactggatcactggctactggatccttcgtctttgcagaaaaccgttgatgggcagctggccgatttggattcgctgttatttatcattgaatttaaacaggaacttggcattagcgatgcggtgttaccgacttatcttgaggagattaccagtaccttatacagcagtgcgtataaacacagtcgggtgggtattagcgcgtctgaactggtcaacgccaacttccagttattagaacaggaaatgatggaaggtcatccttcctttgtcgccaataatggacgcattggttttaatgggcaggatttccagcagttcagcccggaggccgcttcggacattcatttggtctggctggccgcgcataaaagcaaagcgcattttgccagcatcgaacagctagattatcggcaactgatgctgcaagagttgggcgaggaagcgctggcggaatttgaacaacggctgatcgccaaagatctcaatccgcaggattatctgctgatgccggtgcatccatggcagtggctgagcaaggtgtcttcggtatttgctgcggatattgctaaccaaatgctggtgttcttagggacggggaaagatgtctatcaggctcagcaatcgattcggacttttttcaatcggagcgaaccgttacgatattacgtaaaaatggcgctatctatcctgaatatgggctttatgcgcggattgtcgccttattatatggctaccacgccgggcattaatgaatggctgtttgagctggtggaaaatgatgagacgctgcgctgctacggttttaaaattttacgtgaagtcgccagcgtgggtttccgcaacagttattacgaacaggcggtgaccggggatacgccgtacaaaaaaatggccgcagccttatggcgagaaaacccgctgcaattgattcagtcgggtcagcaggtgatgaccatggcggcattgctgcatctggatcagcagggcaaggcgtttttgcctgagctcattactgcctccggattgtccacagagcaatggatagctcgttatttacaatgttatttatcaccgctattgcactgtttgtatgcctacgatctgatgtttatgccccatggggaaaatatcattctcgtgctggagaacgccgtccctcagcatatctttatgaaagatctggcagaggaaattctggtgatgaatcccgtcgcagatttaccggaaaaggcgcagcgggtcaaagtggatatgccggaggatatgaaaactctgaccattctttccgatgtatttgacggcgtatttcgctatctggcggcgatcctcgatcagcaggggaattattcagaagggcgtttttgggctgcggtggcgaactgcatttgggaatatcaacggcaacatcctgaactggccgggcaatttgcacgttatgaactgtttacacccaaaattaagcgttgttgtctcaatcggttacagttggccaataatcgccaaatgctggatttagccgatccggctcagagtctgaaatttgccgacgatttgatcaacccattagttgcttttggaatacctgccgtctagttataagttacatcaatactactgtgccccggaggcaattttccggggcgttaagtcttggtttagggtcggactagcgcgggtgatagcgaggaataactaagggtttacctgattcaggatcggtaataattcggcaacgtaggccgaatactgcctcaatactttcttcagtcactatggtttctggccatccttcggcaaaaatcttcccttcttttagcatgataagatgagtggcatagcgtagcgcctgattaatgtcgtgcaagaccagcaccagcgttttgccctgctgatgcaattgctgacataaatccagcatttcaatctgatgggcgatatccagataggtagtcggctcatccagtaacacgattggagtatgctgtgccaaagtcatggcaaaccacgcccgctggcgttgcccaccggataattcactgaccatctgttgcgctaatggctccaggttgaccgcctttatagctgcgcgaacgatattatcgtctgcggcagaccattgacgaaaaaaggattggtgggcatagcgaccccgcgaaaccaaatcgaagaccgtcagggcttcggagacgccagcgccttgggaaagtagcgatagctggcgggctaaggctttagctctgaaatgctgaatattttgccgatccagtttgatacagccactttgtggcgataaaccgcgacttaacgcgcgtaatagcgtcgattttccacaaccatttggcccaataattacgctaaaagctccgtttttaatgcctacgctgagtttatcgacgacagtccgcgggccgtagcttaaagacaataattgagtcgttaagcgtggctcatcggtgtggtactgcgttgcggccaatgactccgaggataatagcgtagaagggcagtctaactcgcgtggggacgtcattttattctcctgacttcagcgtacagcaaatacatcaaatagataccgccaacggctgcggtgattacgccgaccggaagccgggaaggcgtgggcagcagcagagtgataatatctgacgccagcagcagtagtgcgcccatcaacgcggtgcacagcagggcaattcctttggagcggagcagatggcgggtaatttgcggcgcagataaagcgataaatgccaccgggccaaccaccaataccgctgcggtagccaaagttattgccagtaacagactcaacaaatgtgtcagaccaatattgacgcccaatgactgggcaactccgctccccagacttagaaagttgagttgacgactgagatacaccaaccccggtgtcactacgcttaacgttaggccgataaggcatacgtcgcgccagtttttctccgccaggctgccgctgagcaatgcggccatctggtttgcctgttccagccgtacttgcgaaatggcgaagttgacgaatgccatgcaaagcgcaccgacggcaatacctgaaataacaatttttcccgaatgagataggttgttaatgctgcctgcatagaccaatgcgacggcgcaacaggcaccgaggaaggcacctacggggacaggaatgacgcccggccagagcaacagggtggccactacgcccgcggaggcaccggcggtaatgccaataatatccgggctgcctaatgcgttacgggtagtggtctggaaaatggcgccagaaattgccaatgcggctccggctcctaatgcgactaaagcgcggggaagccgcaattgcagcaaaataaaatgttcaaattgactgccttgcccggaaaggacattgagcgttttttcccattcaaacccgttagggctcaataccatggcgataagcaggcctaacaatagagtcggtaacatcaatagtagataacgctgtgtagtgggaaccggagccaaaaacacccaagatcccagcgttagcgttttacaggaattagtgggaggcatcggcaaatccttttttacgattggcgaccgcataaagcaatgggccacccacggcggcggtaatcacgccgaccatcacttcgcctggagcaataatcactctggcgatgatatcggcagttaacagtagaattggcccgaccaacaggctgtagggcaacagccaacggaaatcgctgccaatcatggcacgaaccaaatgaggtgcggccagaccgataaaggcgattggacctgccagtgccgttgccgctgcggccagcatggtcgcgccaattaaggccagtagccggatttggaccgtattggcacccagcgcggtggcgatattttcaccgaaaaccatgatgttaagggacggcgcaatagcgagaacgagggctaatccgccgataaaatagggcaccaccggcaacatcgccatcatcgacatacccgacagcgagccaagcacccagaagcgatagttctctaacacggcgggatggagtagtaccacaccttgcacataggcgaacaggcaggcattgatcgccgcaccaatcagtaccagacgggttggattactattaggtttgccgccgcttaacagataaaacagcagggttgccagcgcggcaccgatcaatgcaggccaaaagcgagaaatagcagccagcgcaggaaaaaaggcaaagctgacgatgatagccgatgcacccgcgttgacgcccaataaaccgggatcgccgagtggattacgtagcagtccttgcgtcacggctccggacaacgccagcgccgcgccggccatcagacctattaaggttcgaggcaatcgggcctctatgaccaaatcgtgatagttacggtcatcggcgctgaaatagtgccagaccgcgctgagaggtaagggtttggctcctaacgtcaggctggcaacaatacagagtagggtgagcagcaagagtcccacccagccccaaacgcggcatgctcgctgccgccgatgaatctgctgagtcatggcggagtctccgaaacggtagccaaatggcgcgctttctctgcgaccagcggcataaagcgttgcaatccccaatcgacgcttaaaggcgtgccgtaggacattgccatcacgatggcctgatcggtcattgggatgtagccaccgtggcgcactgccgcaatggcattaaataatggctgctgttctactcgctggcgctcctgctcgctgttgtaccaggtcactagaatatccacatcattcagtcggtcagcattttccagcccaagatttgcggcgaaactgcctcgggacgcggtcaggtttttaatcgagggagccaattgcaagccggttgcagagagtgtatctacgcgaggatcgcccgcgacatatatcgatagattggcattattagccgccgctttaatgtaagcgaagcgcagtctcgctatgcccggtaccgttttgcccgcgtcggccagagtgctttctaattgcagtagtaaatcttgagcctgagcttctttacccaaagtatggccgatcaattcaatctgctggcgggtagacgtcagccagggcaagccgggataggcgaccaccggcgcgaagcgcgacagctgatcgtacaggctttggctaatacccgactgagtggcaataatcacatcgggcttcaggttgattagctgctcgatatccagttcgggatacatgtgcagaattgtcggtagagtttgtccttgctgttccagcgcctgacgaaaccagggcagatagccttgctcgtcgccgccccagcgatgggattcaatgccaatcggaacctgccccagcgccagcacaatatcctccgatccggctcccaaagtcacaatgcgtagcggcggacgctcaatgaccgcagtaccgagagcagtcactacctgccgtgggaagcctttttcacgagccgctgttacgccgtctggcgcagaagcgttatcgcagccggaaagcaaaaaaaccagcgccaacaggccggttaatacagtcactattgtccccgtgcgatgacgggcgaatccataggggcttagggaattatttatcaataacatttgggtcgagagtttttccttagtgttatcacaagcagccacggagccgaaaaacgcgctccgtggtgttggcggtattaacaataatcagaaggtgtaacgcacagtggcatccacattacgcggcttgcccactaggtattggctgtactgaccaatttgcgagtaataatgctgattgaataggttatccagattcaccgtaagcgacagctgcggagtgaactgatagcggctcatcaggctgtaaaccgcaaaactatcctgacccacgcgctgcacgccggtcgggctggttacatcactgtaggtcttgccttgccagttgacaccgccgccgagagtcaggtctttcatcgaccctggcagggtataggtggtgaaaactttcaggactttttgcggcgtgatcggagtgaaagtttgcccgtttggcacttgcacatgatattgggtataaccggcgaacaggttccagttttcagtgactttcccgctgatttccgcttcaaaaccacgggttttagtcccgtctacggcatagtaagggcggctgttatctggcagacgcggcgcggtggtatccgccactggcatgttgtcctgacgaatttcaaacaccgctaacgaataatcaatgctgttgtcgaaggcgacgcctttcattcccacttcgtagttttgcccactgatcgggtccaacagttggttatcacgattgcggcgactttccggattgaagatttcggtgtagctggtataaaccgacaaatcgctgttgatgtcgtaaatcaggccgctgtagggcacgaactgatttttatatttggcattttgcggcgtgccgaagttatcgcctcgggtttcccatgtggttaaacggccaccgagaatcaacgttagcggatcggccagagaaagctgagtcaccgcatattgcgcggtttgatcgttacgccctttagaaccgtaggcgcgagtagtgctccagatcggtttaggatactgccagcccggctgagtaaaatcccccagttcggggcaagtactgcgggtgctgcaattggcgggattgtaatagtcgttatcaaaattctggcgttggtggttccagccaaagccaagctgatgttgacgcccaaacagactgtaatgaccgttaacctgaatatcatagttttgctgacggcgagttccgtcaataagcgacatactccctgggcgcatgccgatattggtcgtacgatccggataaccatctgcccacatcacgttttgcagcagtttgtcattatcaaaagtaaaggtacccttgatgttccagccgttgtcgaactggtgttgcaggctgctaaacaacgactgggttcgggtttcggaagaagtccagtcaggcgcggtgctggccgaacgaccgtaatgagttcggccactgtcgctgtaaaacagcggcaacccgccaaacatgcccccttgggtcatattgcgttgagtatcggcgccgatggtcagcagggtgtctggcgtcagatccacttccagaatgccgtaaaatggattgctgctttgtttgtatcggtcaacgaaagaatgggtatcctgatacgccgtgacaaaacgcccgcggacgctgccatcgctattcagcggaccagaaagatccagcgtagtacgccatttatcccatgagccaacgccggcagaaacgctgccgcgaaaatcctgagtcggacgtttacgtaccagattaatcacagccgatgggtttcccggcccggtcattaaacccgccgcaccacgtaccacttcaatccgatcgaacatatcggtatccagcgtgttatcgccgtaattaaagcgggtatcgtaaaaagtggctacgccgtcgcgcataatattattcacgctcatgccgcgtgaagtaaaaccgaagcgatcgctatcgaactgacgaacgttcaggccggtaatattattgaccgcgctttctacgctggtcaggttttgatcgcgcatacgctgtttcgtcagaatactgaccgactgtggcgtttcgcgagcagaaatattcagaccggtggccgtagacattgaagaggtattataactgccgctgtcttccgttacacctgggtggtttagcggcgaggcaatcacggtcatggtggtttcttcagcgctgtttttcggtgatgacttcgcgctgtcattatgattatcgctggcggcataggcgctccccaatagcgataaattagcggcaagagcccatgccacgggtttaactctgtgtgaaggttgcaggcgaatcgggttcttgccgtcacttcttttcattattcttttcaccaaatatcaggttgtgccactggggtgggcagcgacccacgccgctgccgtcattaattaacctgccgttttaaaggcatgaatcgggtttgctaaggtgccagcaaatttgagattcttctcccgatcgtcgagatcgatcatttgctggttattggccatttgcaggcgattcagacaggtgcgaacaaaatcggctttaaacaggtcgaattggttatatttatcggccagtgccggatgctgagcctgataggcataaatgcagtccgcgactaatttccagaattggcgttcgggcagtcccagatctttttgtagaattggcgtgagataacggaagaaacagtcaaaaatatccaggaaaatataattgatcttcatatcgtcttcgatagtgacatgcagatctttaatctcctcgggcagtgttatatcgccgttaagaatggcaatttcttctccgatatctttcattaacacatgtaccggaacgttattctccagaaccaacatcaggttttccccgtgaggcataaagaccagatcgtaggtgaagaaggcgtgcaataacggagaaagataggcatccagataatgtgcaatccatttatctgcgtctaaaccagaagaatgaactaatgcggccacgaccgaatgaccggtattatcccggtgcaagagagaggccatggtcattaaacgctgatggctggcgagtaaggggattgggctttctcgccatagcgctgaaagcattttcttatgcggattgtctttaatcagcgcggtttcgaaataatcattgaaatagcccattgctgcgcgttcccgcaggagggtaaattttttctgttgaaagaatggatcttgggaaaccaacgttgccagccattcattcactagcggcgtggtggccatactgtgcggggaaagcccgcgcataaagcccatattcagaatcgacagcgccgttttaacgtaattcttttgcggattagcgatattaaaaaatgtgcgaattgactgttgggctaggtagctatcctgcccttggcccagataaacaatgtcattgcgtgctatatcggcggcaaagctagtggcaattctttcgtaccattgccacggatgtaatggcataaagaaatagtcgttagcgttcaggccacgggaggttaactgacggaggaaatcttctgtctggtcattccccagttcttcctgcattaactgctgataactgagaccagttaaactggcaaaaacggttttattttggtgtaccgcaatccagataagtttgatcgaatgagcactttccggcgcaaagtgagcataatctgcaatatcaaacccaatgcgaccattattagcaataaaaaccggatgcccttcgctcatcgctgtttctacactttggtagtctgcctgagttaactgtgtcgaactcagattattatggtgatatttaaatgcgtgaccataaagagtgctggagatctcatctaaatagactggcagcattttttcggaaatacaaagcaggctatttaattcaatgataagttgtaacgcatccagtggctgcggtttaccctccacggttttggttaatgtatcggtttcaatatccagatgatctagttggtaagggtaggcactgaagcgatattctattttgttgtgattggaactaacgctgtcgggacaaaaactatagcgacaaaggccattcgcctgcgtttccagacgggttggtgcgattaatttctcatggctaagttcacgcagtattttcccaactaaatgggtattcgctcgagaccagttctcgccattaagatgttggatatagttatcattgaatttccgcgttgaagccatctctatagtgtccctattgaagagtagaatttcagggaataataagcccagacatacctgagggattgatatccatgctcaaggtgttcctatttgtcatttggctaacgttaagagaaaacgattattattccgttcaaagcgggatatatatagcattataaattttttgatgcaaataattatcatttcgatattgataattgcatttgtcggtttttaactgactatatcattgaatattatgtgttttattttatcaggttgttacgtatcaaactgacttaagaactgttttagcatgtttccagtaaaatctgaccagccgttttccagatatatatccagttaaaatgtcatgatattagttttgcttttccctctaaaataataaggttaatcgacggggaaggaacctgaaaatcagaatttaatgaattcaagatggatttattattggtttaattttggttttgttatccgcttttattacggcgttctttattcatatgcctatttttcatttattataactttattgcatgataagtggttttgaggcgtaattataattggttaattttaatcctaggtcgacaatgaaatggatacatgtcaccaatattaattcactatgccaatgattatctatgaaatgattatatatacatctatttttataaaaataattcaataattattacaatataactccatgttttaattaaatttttaaattttttccataaagggataaaaataaattccaatattcttgcgttttataataaccgtctataattaattttgtataactacttaggcagttatcaatcatctttttatatttttttagtcatactgctgcatgatcgcggcagctggaagcctgtgtctttaatttattattagattaattcattggctatattcggttaaattgcacttaagccaaattacttggaactttatctatgaaagcaagtagtaataaaactgtcgatcagtttgatgctgctgtagcgcgtaatggctataatgcggtaaatgagttattacagtatcacgcgcgtggtgatgacctgataagaaatggcaaaccgtcttactctactgaagacgcggggttacagattacccgtaccgggcaaacctggaatggtaaaaatgtttttgatcagccagtaaagctgacctattcatttttaaacagtgttagcaaaattccgagtggcgataagggttttgtcaaattcaatcctgcgcaaatcgaaacggctaagttgtcattacagtcgtgggcggatgccgccaatattactttcacagaaatcgcgtccagccagaaagccaatattacttttggtaattatacgctttcccacgacggttctccggccgattcccaggcttatgcgtatttaccgggtagcgggagtccgtccggttcgacctggtataactacaatgtcgataatattcgtagcccaaataccatggaatacggccgccagactataactcatgagattggacatgcactggggcttagccatccgggtaattataatgcgggtcaaggttatccgtcttataaggatgtaacctacgcggaagacactcgtcagttcagtattatgagttactggggtgagaaaaataccggtggcgataacaaaggccattacgccgccgcacctcttttagatgatatttccgcggtccaacatttgtacggtgcaaatatgacgacccgcgccggcgatactatttacggtttcaattcaaacaccgatcgtgattattacaccgcgaccgatagcagcaaggcgttgatattctccgtatgggatgccgatggcaacgatactttcgacttctccggctatagcaataatcagcgtattaatctgaacgaaaaatctttctctgacgtgggcgggctgaaaggcaacgtatctattgccgcaggcgtaaccatcgaaaatgccattggcggttccggtaatgatgtcatcgtgggtaatgatgcgcgcaataccttaataggtggcgatggcgacgatgtgttattcggcggcggcggggcggacgtgctgtggggtggcgcgggtaaagatatttttgtctttgctcaagtaagcgactccacaccgaaagctaccgactggatcatggatttcgaaagaggtatcgataagatcgatctttcggcctttaatctgggtaaaagcggtggcctgcattttgtcgataacttcagcggtaaagcaggtgaagccatgctgacttatgacgcaggaagcaacgtaagcgatttagcattaaatatcgctggcgaccggtcattcgcagatttcctagtgaagattgttgggcaaccggctcaggcgacagattttattgtttgatagcttagattcttgaaataaaaacaacgtctaatgatttttattagacgttgttaatgacttaaatcagaaactccggaataagctaataggatttttctgggaaaataacgcgtaaatttaatggttgtaattaggatttatcttttttaaattcatgctgattattattacttgtttttaataacgtaaaacatataatcaaaacgcattttgatgattaaacaaattatctttatgtattaattagtctgaaaataattgtatatatgaagtatgtttttatgtaatgccactacaaaggagatgacatggatttgcattttttacacgggtaaatcttacccgttaatgagtgtagatagtcgccgtggtggtgagtttatttaattacaaggaacttaacgttgaaaacaatcaagaagacatctgacgctcaactcgcctcaaataatcatatggaaggttatagtgatgtaatcaatctattcttagattctgttcgtggcgatggcgttaccactactagcggtaaagcgagttatgctttggataaagccgtattgcagttaaatcgcggtggattaagttggaatggtaaaatgaatttagggcaggatgccgatcttaaatattcatttttagaccacaattccaaaattcctactgggattaacggattcattaaatttaatccggagcaggtaattcaaactaaacttgcactccaatcctggtctgatgttgctaatgtccatttcactgaagtcggtccaacggagaaagccaatattacattgggcaactattcgttaacctctactggccagttagcgggcggtcaggcatttaccagcaccagttattacagtgatggcaaaattgcaaacgcgggtacctggtataattacaacgtggataatattcgcgagccaggctcaatggaatatggtcgcttaacattggcacatgaattaggccatgctctggggctgagccatccagcggattataacgcgggtcaaggcaatacctttaaagctgatgcggtttacggcgaagatactcgtcagttcagtattatgagttattgggatgaaactcaatctggagcggatcatcaagggcactacggattaacgccattggtggacgatattgcagcaattcaacgtttgtacggggctaatatgagcacgcgtactgaagataatacttacggttttaactccaatactcatcgtgactctttcactttggcggatagcagcgatcagaaagtgttctccgtttgggatgcgggtggcaacgacacctttgatttctcaggctatagcgttgatcaacgcattaatctggaagcgacgtcattctctgacgtaggcggcctgaaagctaacgtttccattgcggcgggtgtcactatcgagaatgcgattggcggttccggtaatgacgtcatcattggtaatgaagccaataatgagttgcgcggcggagcgggtaatgacgtgctgtttggcggcgaaggtgcagataaaatgtggggcggcagcggcagcgatatctttgtttacggtcgcgccacggattcgacactggccaaccctgactggattatggattttgaaggcggtatcgataaaatcgatctgtcgggattccatgttgggacaggtggaattcattttgtcgattacttctccggttctgcgggtgaagcattattaacttacaatcctgacactaatatcagcgatttggctgtgaatatcggtggtgcagaagccattcctgatttcctggtgaaaattgtgggtcagccaatgcaggcgactgactttatcgtctgatagaaaaagtgaaatatagccaatgtctgattgattaaatcaggcgttggctatgaataaaaaattaatggcaggttttgtctgtgttttttatgagaataagataaatctataagttattgactaataatttttaggaatatttttatttattataaagaaaatattttccttaataagatttatgattaaaagatttatcacgtagggtggttttacggcagcggtatagtgattttaattattcattagtggatacccagatcgctaaagcattttgtgttaaaggtgcttgcagccgtacagttcgaaaaatctgtgaacggtgatgcttttgaattgagggtcatgacaaaagcattggttttatctaaccaaactatccggaatatacgtgatgaagcaaagtaaaaataaaataacagagcagggacaacataatgaatatcagttgggaagtttatacgcgcaggggctaatggcgggtgcaactgatcgaataggcacatcgttaaagcagaataaagtgtcgtttacttcggaagaagccgccgatgccattacacgaacaggtcacagttggaatggcatgaaacaaattgatcaatcggcagaggtcaattatttatttttgaaccctaggtatggcgctaaaacgcctgcgggtgactctgggttgacgaaatttaactcagcgcaggtcaccgcggcaaaacaggcaatgcaaagttgggctgacgtagccaatgtgacatttaatgaaaccagcgcggttcatgatgcgaatattcgttttggtaattatgaaatttactccgggcaagactctaaccctagctttaaaaccggatatgcatatttcccttgggggccatcgagtcaggtaggagtatggattaataacaatcatcaagggaatcaacgtccagatttatatcaatcaggtcatcagaccttaagccatgaaataggtcatgcgcttgggttaagccatccagggcgctatgactctctaaaaggtacgccaaattatggtaatgcgggttatgcggaagacagtaggcagtacagcataatgagctactggagtgagtggaatactggcgctgattttaaaggtttctatccagttggccctcaaatagatgatatcgcggcagctcagcgtctttatggcgcaaatatgaacacacgaactgaagatactgtctatggtttcaactcaaatacgaatcgagactctctgagcttaaaccatagcagtgataagaaggtgttcgcagtttgggacgcgggtggtaatgatgcgtttgatttctctggctattcaaacaatcaacggattaacttgaacgaacagtcattttccgatgtcggcggtttggaaaaaaatgtgtccattgcggcgggcgcggtgatcgaaaacgcgattggtggttcagggaatgacattttgatgggtaatcatgtcagtaacatcttaaaaggcaacgccggcaacgatgttatttatggtgcaggtgggggagatcatctgttcggcggcgaaggtcgcgataccttcttttatggcaatatccaggattcaacatcagagaacccggatactatttatgatttcgtcagcggcatagataaaattgacctgagaggtttgaatattgctgaaaatagtgcgcggctggtgaatgagttcagcggtaaagcaggagaagcgatactgagttttgatgagacaaccggaatgaacgaatttgcgttgaatcattcgggcggcggactttcatctgattttaccttgaaaattattggccaaccgatgaaggctgctgattttctcgtttgatagttgataataaaatattgccggcgtctgattgacttaattagacgtcggcgataaaaaagagaatagaaaggctattttatgttttctcattaatttctctggttatggcgctcgagttaacataatgttttctcaattgaaagggatttaattatgaaaaacataaagaatgaaatgagtgaagtgtcttacagcgttgtccacaaaatttgtatcattaataaaagcagtatcgattgtctagatgatgggaatgtcaataataacgcaagtggattatatggcggcaaaatatttaattctcccatgccgagcaaagatatttatgcctacaaggatataaaagatcaatcctgttatcgaattgattttatgtggtatttttaatttttcgtcgatagattggatgtttcaggtatgacatcgctccatggggcgaggttaaatgttgtggatgactttaattgtttatcaacgactggtgatgcaatgctggagtatgattcagctagcgatataacccattttcacatggcgaatgttaataatggcgttatggaagatcattttgaagtttccattattggtaagcttggcttggatacggattttattttctaagtcgatcaacatctggaatagcacatgtacggatattcctatgcgctattaatacaggagcagttatggtgaagcggttattacttcaaccttatcgaacatttttgtgtgccactttggcgttattaacctcaataagttctggagagattatggcaagcagccaggtattacctaaagccagcgatttaagcggtcaatggcaagtacagttaaataaatcagcagaaaaagcctgcagtattgaattgaagtccacggcaataaaacccaatctcacttggcatgccagcggcgatgttgcctgcttagaacaattgctgggcagcgcgccacagggttggcggccaacgccggatggtatcaccctgacggatcaaaccggtggggctgtggcattttttgagcgaacccaagacggttatgaaatgacgctaccggatgatgcgggagtaatgatattacgccgcgtacaggattaattttcgttacggataatctgatgacttcacttttacctaagagtgaagtcagaaaataattatcgcccgccagaaagccgttaaggaaaggttatggtttctcatccaattcgcaattatgaccggttacgagaggcgctgggcgcatgtcgacggagtttttacggcgtcggcattttcagcgccattattaatatactgatgttggcgccctccctgtatatgttgcaggtttatgaccgggttctggcctccggcaatgaaatgacattgctgatgctaacgatcctgatggttggcttatgtttttttatgggcgcgctagagtgggtacgcagtttggtggtaattcgcctcggtacccgattagatttgcgattgaataaacaggtatttaacgccgcttttgaacgtaatttgcgggatggagattctaaagctgggcaggcgctgacggatcttacccaattacgccagtttgttaccggtaatgccctgtttgccttttttgatgcgccatggttccctctgttcctggcggtcgtatttttgctgcatccgtggctcggcatgttggcattaggcggcgctgtctttctgattttcctcacttggctcaaccaatacgtaactcgccgccctctggcagaagcgaataaactatcgatgcaagcgactcatcaggcaaatacccatttacgcaatgcggaagtgatcgaagccatgggaatgttgggaaatatgcgcaatcggtggttgtcccaacactatggatttattcgccagcagaatcttgccagtgaacgttcagctggcgttaatgctttgtcgaaaagttcccgcataatcttgcaatcactgatgctggggctgggggctttgttggcggtgaaaggagatattactgctggaatgatgatcgccggttccattttggtggggcgagtgctgagcccaatcgatcaactgattggcgtgtggaaacaatgggttgcggctcgtcaagcatggcatcggctgcatttgttgctcgataatcacccgcatcgcgaagacgcaatggcgctgcccgcgccgaccggtcatttaagcgtcgagcatatcagtttccgcccgaatcataaccaagcgccgcgtttgcataatatccatttcgctttacaggctggagagactctggggattcttggcgcttctggctcaggtaaatctacgttagcacgcctgttggtggccgtacagccgccgacgcaaggcacgatcaggctggattcggcagatatgaatcagttggataaagaaatttccggggtttatatcggctatcttcctcaggatattcaactgttcagtggcaccttggcggagaatatcgccagatttggcgaaccagacgcagaaaaagtggtcgccgccgctaagctggctggcgttcacgaactgatactttctttgccacagggctatgacacggtgcttggggaaggcggcgcgggcctgtcgggtgggcagcgtcagcgtattgcgctggctcgtgcggtttatggcgatccttgtctgttggtgctggatgaacccaatgccagtctggatatggaaggggatcgcgctttgttaatggcgttggatgccctacaaaagcgcggctgtacgctgattttgatcactcaccgaccggcgttaacggcgcgggctcacaagctgttgattctgaatcaaggacagcagcagcggttcggtcccgcaggggaagtgatggcggagttgcagcagttgaacgcggcaaatcaacctgcattgaaacgcgagccgcaaacggcgggaattccgggttgagtgacaataaaagagaaaccaggcatatgtccgaagacaataaaaaaacggaactggcatttttacgggaagtacaacatagcgagaatcgggcgttgtactggggatgggggctggtcttggccggatttggcggctttatgctatgggcgctgttagcaccgctggataaaggcgttccggttacgggcaccgtggtagtttccggcaatcgtaaggccattcaacatcctgaaggcggtatcgtcgatcgtattatggttcacgatggcgatcgggttgaggccggagaggtcttaatcaccttaaatgctgtgcgggcgcgttctgccagcgatgggctgacgtctcaatatcatcaattattagccaatgaagcgcgtcttttagccgagcaaaaaggcgagtcacagttagttataacgccccgtttgcagcagagccgtgagcaaaaaggtatggtggaaattctggctttgcagcagcaattgctgaacagtcggcagcaggcgttgcaaatggaaactgatgcgctgaacgccaatattgccggattacaggctgcgatgggtgcacaaaagcaggtgaggagtaataaaaacagtcagcggcaggcgttatcccagcagctggacggtttgaaatctttggcagatgaaaactatgtcccgcgaaataaaatgctggaaaccaaacagctttattcacaacttaatggcgaaattgcgcagatcggcggcgaaatcacccgtggagagcgtgaaattcaggaacagggattgagaattaagcagcgccagcaagagtatcaaaaagaagtcaatactcagttggcggaggtgcaatctacattaacggaagtggctagccagttggaaaaggcagatttcgatttagctaatgtccagatgcgctcgccggtggccgggaccgtggtggaaatgaaagtctttaccgaaggtggcgtgattgctgccggtcaatcgctgatggagatcgtgcctgataaccagccgctgtttgtcgatgcgcgagtaccggtggaaatggtggataaaattcaccctgggctgccggtggaactgcaatttaccgcatttaatcagagcactacgccaaaagtagaaggttcggtgaagctgatatctgccgacagagtgttggatgaacgcactcaggaaccttattacagtctgcgggttgaggtcagtgatgcagggcggcaaaaactggatggtttacagattaagcccggaatgccggttcagggttttgttcgcaccggtgaacgttcgttgatcaactatctgtttaaacctctgatggatcgcctacatatggcattaacggaagagtagggagcgcaggatgccattaacgttacgaatcatttttctcaccttattagtattaccggggaggggaaacgcattgggtctgttggatgcgtgggaactggcggtgcgccacgatccgcaatatcaggctgcgggttatgaaagagacgccggtcaggaagaagaggcgttggggctgtcaggactactgcccacggtgcaatacagttatggcgctaacaataactcttccacggtaagccagacggataaccgaagcagcagcaaagtgaagcgcgattatgatagctatgtctcgatgttatctttacgtcagccgctgattgattacggggcgtacgcacgctatcggcaggggatcgcacgtaaactctttgccgatcaacgttttcgcgataaaagtcaggaattgatcgtgcgtttgtatcgcgcttatagcagtgcgctattggcgcaggaaaagaaatctctgctggaggcgcagctacgcgcgtatcaggagcaaattcagttgaatcgccggttgctggctgccggggaaggcactcaaaccgatattgatgaaaccgccgcgcgtttgactctgactcaggtacagctaatcgagcagcaggatgcgctggatagtcagctaaccgagttggaaaatatgattggccgctcggtggatctggcggagttacggccacttacgctggaaactttgccgcaaaatatcagcgatggacggacattggctcaatggcgagatttagccatgcggcataatgcacgcttggctgggcagcggaataacctggatgccaaacactatgaaatagaaagtagccggagtggacatttaccgacgttgcaattagttgcttcatcccggaattcccgctctgaatcggaatataactacaatcagaaatacgatacgcaaagcgtcgggctgcagttaaatgtgcctatttatgctggcggcagcgtatctagcgctacccgacaggcaaccgcgcactatcaacaatctcaggctgaattagatcaggaaacccgacaggtattggcggagttaaagcgtcagttcaatttaagtaatagcggagcagcaaaaatccgagcctggcaaatgacagtggattcggcgcagaaagttttgatagcaacgcgtcgtagcgtgttggggggggaacgaattaatctagacgtgttgctggcggaacagcagttattcaattccaaacgggatctggccgaggccaaatacggttggttgcagtcgtggctagagctacgttataacgccggtactttgcaagagaacgatattttgcaattggcggcctggtttgaaccggaaaagcgctagctgaaccgacagcctgtacaatagggaagcgcggcttcccttttttacgtccctattttcctatacagaaatattttcacaaaggcgtttagccagcacgcaacttgttcaccatattcttgccctcgatttcatccccgtggtttaaccgtaggtttgttagaaaggccgtaagctggatcaatggtgttagaccgtattctggtggataaaactgattttttaacctgaatcaacataatcagcgtctattgtggtgtattattctgccatcccgataggtagggttctccatcgggcttaacgtagtcagttaatatgtcgattgtcagaggagaggcgagatgcactcagcggccgattatataaccttgggtttgattgtgcttatttttggtttttgcctgtacggcttgtttggcgcaccaaagcaaaagtaacgattattcctatttctcgccccacccgttctgcgtggggctattttctttatcggtgtacttttctaccattcgttattatctctatctcgtaagattatatttaaaaatcataatacttcttcattttcgtgcatgtaaatgcccagctttacttgattattgttaggttgagtgaactatcgctagcgtacttttgcaaaaaaagccatagattaaattcgtctaaataacgcatttatactgataaaacgatttatccactgaagtagtaatgaaagggaatgggctatagttaacttattctaatcaaaatggtcttttagccgatgggcaatgtaacggcggaaacgacgggaataaatacaactattcacccttggtggctgcggctaacgcattgggtgaatgcgctggctattattatcatggtcactagcggttggcggatttataacgcctctccactgtttaatttttcttacccggattggatgacgctaggaggatggctaggtggcgcgttgcaatggcatttcgcagcaatgtggcttattttctttaacggcttgttttatttatttatgaatacgataaccggaagatttaaaggaaaattctggccgttaagcctgtctgcactttggcaagatatgcgagcagcgttaaccggtaaactcagccatgccgatttgcgccactataatatggtgcagcgtttcctttatttggtgaccgtgctggctttaattactctggtgctatctggtttagtcttatggaagtccgttcagtttccgttattgcgggaattactcggaggctaccctaccgctcgttatattcatttctttgctatgacctacatcgttttcttcacgctgattcacctgatcatggtgatattggttccccgaacattattagccatgattcgtgggcgctagaggcgaaaaatatgaaacagaaaatcagggttaaccctgcagtggatggtgacgaagtggtaaaagaagtcacgcgaattctggccaaagggttggattcagccagccgcaggcgttttctcaatcaaggattgaccttgggcggtgcgatgctactgaccggctgtgattttgatagcgacgcgcagatcgattcacagttaatgcgaatttctcgtttcaacgatcgggtacaaggctggctgtttaatcccaaaaatctggctccggtctatccggaatctatgattactcgcccgtttccttttaacgcctattactctcaggatcaaatccgtcaggttaatggggaaagtttcaggctcgaaataagcggtctggttgataataaacacccgtggtcattacctgagttatatgcaatggcgcaggttacgcaggttacccggcatatttgtgttgaaggttggagtgctattggcaaatggggcggtattcctttttcccatttcttgcgtctgatcggggctgatttaaacgctaaatacgttggttttaagtgtgcagatgattattacaccagcattgatatgcctacagcattgcacccgcaaactcaactgacattaacttatgatgggaaaatcctgcctgcggaatatggatttccgatgaagctacgtatgcccactaaattaggctacaaaaacccgaaatatattcagtccattttcgttacgaatacttaccccggaggcttttgggaagatcagggttataactggtttggtggcagctagtctgctctcaccctcaccctcagcctctactacttgacctaaaccaaaaaaggaatatgcgatgaaaaagcctattattctaatgctctgtagctgtattgcactgggaatgggagttgcccatgccgaggacactatgagcaacacggcaagtaaagaaatgagtatgaaaaaggatgatatgcataagcaggagatgatgaaaaaggacgatatgcataaacaggaaatgatgaaaaaggatgatatgcataagaaggaaatgatgaaaaaggacgatatgcataagaaggaaatgatgaaaaaggacgatatgcataagcaagaaatgatgaagaaagatagtatgaaaaaacccatgcctgagggtgaaatgaagaaagaaggtagctcttactgatgattaaccggccagagaaggtgtggccggcatcctgtctgtgatttaacgcattaatttgatgggctttttacttgggtaatcagccctaaaaactctcttttcaagaccgcttgagacataagttactcggccaaaaaccgggacgggagaacatcaccagatttccgagtaaaatcaggatcagaccaagtacggcattggcatgccattgataaccttcatagaaggtggagagagtgagcgctacaagtggaaatagcagagtactgtaagcagcagcgctggctccaatacgcccaaccagactgaagtaaagggcaaaagcgatagcggagccaaaaatagccagataaaacaaggcgccaagatagtgagcggagagttccagagtaaaactaccgtgctgtgcccaggcaataacccccatcagtatcgccccgtagctcatagcataggtattggtcgacaggacatccaaaccgcgtcgttgatgacggctgctaatcatatttcccaaagagaagccgtaggtacccagcaggctcaggccaattcctttgagtaattcaggctgtaattgtgtcgccataagatcgtgccagaaaagcgctacaatccccgtcagccctaatatgctggctggaataaagttagggtttaaacgttgccggaaaaatatgagtccgttcactgcattgaacagcaccgccatggagaaaataaccgattccagtccgctgctaatataagccgccgcttgataaaaacagtaaaaattaaaaccgaaaacgcacatcccctgaatgacgcaaaataggtgatcccgtaaggcgatacgtcgtaatcgacggctaaccaataggataatcagcatggtcagagtcgcgatgacaaagcgataaaaaatcgattgggtcaccggcacgctgccctgttgcatagtaatggcaatccaggtcgtaccccaaatcagaactacggcgctgtacaataaagcattcattgaatatctcgttcagaaaatcatgaaagagattatgattctttcgcccaatctgtgctttcagccctttgccagcatttgcataatcttgcgcatttcttaataactacgtagtgaatctctggtttgcatcacggcaactcagtaaactgtgaattctgtcatataaggagttgttgcggtgaaatccgagaattatcaggctttcgataccctgagaggccataaggcgcagctgcaaaattctgtgcggctcgggtctggcattcagttggcagcctggaccaacagtcaggattgcgtcaccctggataatccggatcaccatactctgagtttgtacgtggccgatggctatgagtgttatcacaaaaccgccggtggctggaaaaacggcggtggtccggatcggttttgtattatgccgaaagacagttattccagctgggatgtgcgcactaatctgtctttcgtccatttatattgcacagacgatcatttgcgttctttggccgagcagatttgggaccgaagtccggcgcagctacaggttgacgagcgcgtatttgcggatgatatgcaaattactttgttatatcggcaatttttactcagctgtgattggcaagatcgagccaatcagttgaccttgagcagcgccagtactttattgctgacccatatgttgcgtcattacacccaattgcagtgggcattaccgcaggtgaaaggcggtttggctcccagcgttttaaaacgggttcaggaatatattgaaagccaattgtctcagccattactgctggcggacctggccaaattggcggagcttagtgaatttcattttgcccgaatgtttaagcaaagcaccggattagctcctcatcaatatgtcatgaaagtgagattggagagggcggcttcattactgcgccacggcgatttgccgctgacagaaatagcattagcctgcggtttcagctcggccagtcattttagccaccgttttaaaagtgcctttggctataccgcctctgcgcttcggcaagaatcgcgctgatagtatttagctgatagtatttaaatgcagttaagcttaagccgcgataagttttcttggcgaaagagtttcggccgtcaaaatatgcagagtacgaattttgcccacgatgggcgatagcgttaaaaataagcctatctgacgtcaattgatatacctcaaagtgttcctctcttttcttcagcttattcattgcaacttttttgtggctatgccggaaaccgcatttttgcatgacctttcccgaggccggattacggctgaggtgacggccgtaaataacaaataatcctaagcgttcaaaggcaaattgacacagcgccttagatgcttcgctacatattccttgtccccactattccgtaccgatccagtgccctatttcgccttgattctgatggatatccattagggagatagcacctaacaggcggccattttcaatgtcgctaatagcaaaaacgaccgttttcatttgttcccaggttagcgaatggtcggtaatccattcttcggccagttcgacaggatagtgatgcggaatagtggcggtcatttcgacgatggcggatttcgaagaacaagatagcgggtaatgcagattttctgtctaaagagcggatacactgagtgccacaatgatgatcaataggtgggaaggaaaagtcagtggacaacgaaaaaatcaaacatttgcagggcgttagtgagaaagccagagcggtgatggagcgtgagaagatcgatgctctggtcgtcaccctgtgcgataacttttattacctcaccggttttgccagtttctttatgtataccttccgccataccggtgcggcggtggcggtattatttcgcgatccccacttaccgtcactgatcatcatgaatgaatttgaagccgctggcgtaacttttgatatgcctaatgtggagctgaaaaccttcccggtatgggtagacgtcgacgatccctttaatccagagcaatcgaataaacggcgagagcgcccgattggcccgccggtaacggccgtcttcaatttgttaaaagcggcattgtgtgatgctggcgtattggataaaaaaattgccatcgaattaaatgcgatgtctcacggtggcaaaactgtattggatcgcgttgcgcctggggtgcagtgggtagattctacgccgattttcaatgaaatccgggtgattaaaagtccgtgggaaatagcctatctacgtaaaagcgcagagatcaccgaatatggcattacggaagccagtaaactaattcggcacggctgcacatcatctgagttaaccgcagcctataaagctgccattatgcagcacccagaaaccaacctttcacgctttcatctgatcagcatcggcgagaattttgcacctaagctaatagcagaaaccgccggggcgcagcatagcgatctgattaaatttgattgtggcgtggacgtcgccggatatggcgctgatattgcccgaaccatggtgcttgggcaagctacgccgttggttcagcgaatttacgacagcattcgtcttggacatgaacacatgctgagtatggtcgcgcccggcgtcgcgttaaaagatgtatttgattctacgatggatgttatccggaaatcaggcttgaagcagtacaaccgtggtcatttggggcatggcgacggagtcttcctcggtttggaagaggcgccatttgtcagcacgcaggcgacggaagtgttccagcccggtatggttatgagcctggaaacgccttactacggccacggagtgggcgctatcatgatcgaggatatgatattggtcactgagacaggcattgagttcttgagcaaattgccgcgagaactggtttcccttccgctctgatggtcctggaaatctgagtaagatttcagcatgaaaataagtgatacgaagctggtaggcgatgatggctgccagcatttacggcatcagtcgggtacaggcaggagaagaaaatgcggtatatgaatattattcttaaaagagtctacgatgttcatcctccttatgatcccgatacttttctaatagatcgtctgtggccacgtggaataactaaagttcggctgaacggtgttatctggcttaaagagatcgccccaacgaatgaactgcggaaacagtttcatcaacaaggtgattggccggcttttgtaaaagattacacgatgcaattaaatagcaatgctgttgtatggcgtccgttgcttgaaatagcaaaggagagaccactgactttgctctacggtagcaaagacgcgcagcataatcacgctatcgtattgagaaactatttgcatgcttattgcgaatgatttaatgaaaagagggaggagatataaacagataattcgggtttggaatgaggaggaataaggtttgaatgattgctaccgttgcctacacataatccactctgcctttaattaaaagttgagaaaattcttattctagcgtgatggagataattaggttttttcctagctattgtcattaactcaacaaaatttaatgctatgcggctattgcttgacccttcattgaacatcccccccattagactcaatcaaaaaaatgacatcattgattaatatgaaaaatagaacgctaaccaattcaatagattagccctgaatagggcgggctatggatgataaaagcacgtgtctataaaaaatcaataagcttattggaataaatgaatttccctatcttttaatataaatattcttttccgtaattatatctaggtcaataaactacttatttctaggcgcgttctgctttattttgacatcttgttatgcaacttgttgaattttaagttttttttgttgttttttcaaatcttcattttgtctgcttggcgcgatattttgcgctaaggaattgcgtagatttggactattcagttgtttattgtgctttatgtggcaagaatgcaggtggatggcctttaaatatcggttaagtcaggctattgaccttactttttgaataaattatctttgtaagaaatcgacaggcgtattttctttaagatactataattaacatcttgcaatcttttcatctcagctgaatctcaccttgtttttattgggatacggatgttgctcgatagtgctgttttatcattaaacaaaacgttcgctaaagggttataaaatgagtaaagcgatattaacgctgctgcgtccatttcaaagacccagaatgactttattggcattatttgtttcagggctagcagttaatccagttgtcgcagatacacactatgattcattaattattcaagcaagggatggcaataccacgccaattctagattttctacaaaaagcgtcttctgcaggaatgcttaatagcgggcaggttgccgactggctacaaattgccggttgggcagggcacgataatgacgttattgccatttatcaacgttatcaatccagtatgcaaataccggccagaggattggctgcggtcgcgcgcgcctatcgtaatcaaaaacgttgggatcaggcgttagcactttggcaggccagcctgaaagctgatcctaataacaccgaattgatcagtgcgatgatcatgactcaggctgacgccggtcgtgataaagaggcattgcaaaaagccaccgaattggtgaagagaacgccttctgcccagagctatctggcgctgtcctatttgcacagcgcggccaatcgtcactacgctgcactggaagcggcgaccaaggcgatggattttacaccggtctcccccgaagtgataaagaatcatgttgccatgctgcaaaagaaccgtgtggcggctcccgcattaaaagttgcgcaggaaaatagcaaactattcactccggcgcagatgcggcagcttgaaagagacgcgctggcggaaaaagtacgccaggctagcctgccgacacgcagcgaacaacagcgttttgatctggccgatcaagcgttggaacactatcttgcgctgctgatcgcgtggcagaacaaccccgaaacccagacggactatcaacaggcgcgtattgaccgactgggggcaatgttggctcgcgcgcaaatgacccgtctgattaacgattatgaagcgatgcagcgtgaaggttataccctgccaggctacgcgcagcgctgggcggctagcgcctatatcgaccgtcgtcagccggaaaaagcggcggccattctcagcgacatgtacttcaaagacggcaaaaccgttgcgaagaatatgggactggaagatattgatgccacttattacgcgttgctggagagcgagcaactggataaagctcaggcctttgccaatgcggtgagcaatcaggcaccttatcagctgtttatgtataacctgccggtcagaacaccaaatgatgaatggttggaggggcagtttttgttggcccaatcggaagttaattctgatgaattaccggcggctgaacgtcgtttaaccaagctgaccggtaccgcgccggtcaatatggatctgagaattgcattagccaaagtgtatgccacgcgcggctggccgcgtcgggcagaaagagaactgaagcaagttgaaagcctggagccgagcagtattactcttgaggcggcgcaggctgaaaccgcgctggagttgcaagaatggcggcagtttgaattactgattgacgatctggttgcccgcgtgccggaaaacgtcacaactcaggagctggctcgtcaacgtcagattcgccatatgtcggagctgcgcatttccggcggacgcactttggcatcggatagtccactcagcggtaaaaacgatcagggcattgaggcgctattgtatagcccgcccattgatgaaaactggcgcgtatttaccggcggttcctttgataatagccatttcgaagaaggccgtggcatcaaccgggtgctacgtttaggggccgaatttactgctcgcaataactgggtagaagctgaggtcgccaaccataattatggttatggcaataaggtcggcgggcgcttatccgcttggcatgacttcaatgaccattggcgcatcggaggttctgcggagaaactggcaaaaaacacgccgcttcgtgccttgaaaaataacgttaattcggacagcgcaaacctgtttgtccgttggaatggcagcgatcgtcaggatgcacagctaagcgtgacaccgtcacacttctctgacggtaaccatcgttgggaatacgcgttcaacggtcgccagcgggtgtataccgcgccgtacttgtccgtcgatctgaatctggatttgtccagtagccaaaataccaaagaagacaccttgtattacaacccgaaaagggacttctctgccgtgccgtcgctaactttcgaccacattatgtaccgtcgttataaaaccgtctggagccaacagcttcagctcggagccgggacgtattgggaaaaaaattacggaaccggagccgtaacctccgtgggttatggacagcgcattcagtggaatgacgtagtggataccggtgtttccgtaacctgggataagcgcccgtacgatgggaaacgggaacgtgacgtccagctatcttttgacatgaactatcgcttttaaggaatcctcgccatgccgacattctcattcttaatccggctgctcgtggttgggatagtaacgctggtgcctgcctcttacgcggagtcagatattccagagtttaccccaccggcgatgcggacgttgccgcaaagtgaaaaaccttggaaaaccaatgactttgtggttatcgcctaccacgacgtggaagacgtagctgccgatcagcgctacctcagcgtgcgtagcagcgcattgaacgatcaatttgcctggctgcggaacaataactatgttccggtctccattgagcagattttaaccgcgcgtaatggcggtaaacctttgccgaaaaaggccgttttactgacgtttgatgacggttacagcagcttttacgaaagagtttatccgctgttgatcgcctataactggccggccttattggcaccggttggcacttggttggatacgccgatggataaaaaggtgaactttggcggattaatgactgaccgcaagcgctttgctacctgggatcagatccgcgaaatgtcgcgctctggtttagtcgaaattggtgcgcatacctatgcttctcactatggtgccaacggcaacccgcaagggaataccgaaccggcggcggtgagccgtatttacgatcgtaaaactcaaacctacgaatcggaagccgcttatcgtcaacgcatggaaaaagacgtggcgctgattactgagcggatcaaacaggctacgggaaaatcgccgcgggcttgggtctggccgtatggtgcggcagggggcacggcgctggaaattgtcgccaaccacggttatcaactggccttcacgttggagccgggtattggcaacgtgaataatttaatgagtattccacgcattttgatcagcaataatcctcccatcaaagattttgcgcagtccgtcaatagcgtgcaggaaaaagagatcatgcgcgtggcgcacgttgatctggattatctctacgatcccgatcctgtccagcaagggaaaaatctggataaactgattcagcgcatttatgaccttcggataaataccgtgttcctacaggcattctctgatccaaaaggcgacgggaatattcgtcaggtgtatttccctaaccgttggataccgatgcgtgctgatttgtttaaccgggtttcatggcagctggcctctcgcgctgaggtgcgggtttatgcctggatgccggttctggccttcgaaatggatcctaaactgccgcgcattcaacggataaatattgaaaccgaaaaggttgatgtcgatcccaaggcgtatcatcgcctgacgccgtttaatgcggtcaaccgtcagcgcattattgaagtgtatgaagatttggcgcgttatgcgccgttctcaggcattctattccacgatgacgctctgatgagcgattttgaggatgcttctccggatgcgatggcggcttacaaaaaggccggtttccctgattccattcaggctattcgtcagaacccggaaaccttcaaccgctggactcggtttaagagccagtatttaactgatttcaccaatcagttaatggagcacaccaaagcgattcgtgggccgcagattaaatctgcccgcaatatctacgctatgccgattatcgatccaaaaagtgaagcctggtttgcccaaaacttcgatgagttcctggcgaattatgactgggtagcaccgatggcgatgccgttgatggaaggcgtgccaatgtctaaatctgacgaatggctggcgaatatggtgaaaaccgtggctaaacggccgggggctttggataaaaccgtctttgaattgcaagccttgaactggagaaaagccgaggggcaggatgaaatcagcggcgaagtgttggctgattggatgcgccaattgcagcttaatggcgcgcaaaactttggttactacccggataacttcattaccagcgaaccacagctggagactatccgtcctgcgctctcatcagcctggtacccactcaaatgacagatagaataattgcttttattatcttatgtttagtgttgagtatcccagcgggaatggtattgatgttcaccggggatgttctgctcaacttcgtgtttttctacccgttatttatgtcaggaatctggataaccggaggggtctacttctggctacgtcgtgagcggcattggccgtgggggggcgatgttgaaccaccggaactgaaaggtaatccgctggtttccattcttatcccatgctttaacgagggattgaacgcgcgggagaccattcacgcggcgctggcgcagacctatcagaatatcgaagtgatcgccattaatgatggctccagcgacaacaccggcgaagtgttggatgaactgcaaaaggaagatagccgcctgagggtgctgcatctggctcaaaaccagggtaaagcggttgctctgcaaatgggcacagccgccgcgcgcagtgaatatctggtgtgcatcgatggggatgcgctgctggataaacatgcggtgccgtatttggttgctccgatgattgaaaatccacgggtgggggcagtgacgggaaacccgcgtattcgtacccgttccacattaattgggcgtattcaggtcggggagttttcttccattatcggtctgattaagcgcactcagcgggtgtatgggcaggtattcaccgtttccggcgttgttgcggctttccgccgtagggcgctggccgacgtgggatattggagtccagacatgattaccgaagatatcgatatcagctggaagttacaggtgcggcattgggcagtgttctttgaaccgcgcggcctgtgctggattctgatgccagaaaccttgcggggattgtggaaacaacgtttgcgttgggcgcagggcggtgcagaagtgttcctgaagaatatgttcaagctgtggcgctggcgtaatcgtcggatgtggatactgttcctcgaatattcgctttctattacctgggcctttacctacgccatcagtattctgttgttcttcgttggctttgtggtgccattgccgccgggtattcatgtggagaatatattcccgccggcgtttaccggcatggtgctagcattgacctgtttgctccagttcgccattagtttggtaattgaacgccgttatgagccgaaactgggcatgtcgctgttctggatcatttggtatccgatggtgtactggatgctgagtttatttactacgctggtcgctttcccaaaagtgatgctgaaagtgaaacgtaagcgtgcccggtgggtcagtccggatcgcggtattgggagaatcaaagaatgagtgcgcctctgattcaaaccgagcagcgtttgctgccgaaattgatagatatcatcattaccgcgtttgcctggtgcggttttatctatctgtttgtcaatgggttgcttgccactgtccatcatgccccgcacgcggggacgattccgctgcatatctatctgctggaagggttaagtaccatcgtgatttatttactgattgcgctatttaacgccttggtactgattgcgtgggcgaaatataaccaggttcgttggcgggttgagcgtcgtcagcatcgtcctcatttagaggatcatgaattagccagcaccttatcggttcaggctgaattaattgctgaattaaaaggcggtaataatttcgttctgtataacgatgaggatggacgtttggtggatgtgaaactcggcaaccgtcattaagttaaatattctgagataagcatccctcggccaggctgggggatgctgactttatcctgatgctttatcatcggtgagtggttaggattcttcgttatcatcgccgtaatataaggtgccgatgcggatgatatctcgcccctgcgttttgcggtgtagattggaatcgcgtagggaataaatgcagccacaatattcctgctgatagaatttttcccgcttactgatttcaatcatgcgcgatgaaccgcccatttttcgccagttataatcccaataacgtatccccggatatttatccgccgcacctttgccacagtcatttatttgctgcatatttttccagcgggaaatgcccaatgagctggaaatgacgttaaaaccgtgttcataggcgtatagcgcagtgcgttcaaaacgcatatcgaaacacatggtgcagcgaatgcctcgctcaggttccttctccatccctttggcgcgttcgaaccagttatcgctatcgtaatcggcgtcaataaaaggaatattatgcttctccgcgaagcggatattctcgtctttacggatcaaatattcacgtttgggatgaatattcggattataaaagaagatggtgtactcgatgcctgacgcatttagtgcttccataacttcgccggagcaaggcgcgcagcaggaatggagcagaagtttactctggttatcaggcagcgtgagcttgggacgaataaagtcaggcatatttttaaccgtaaatttaagtagttagccttaagtgtgtcgtattcttttctttgggtaaatcattttacgtttattacaccccatttaggaataaatgcaacagcgagagcggaatcgtttaccgttgatttcatgatcaatagttgacgaataatactgtcacgttcctccttttttctttcgcttatgctagcttggaaccgggaaaaagatggcgagcgttttcaatgtataaagagggatagccgtgagattaaatgagtttggacaagcaattggcgacgaattggcagattggcaaggcgcattgttaccgcaaaaagaagtgctgaacggtcgtttctgttatctggaacccgtcaatatggccaagcatgaaaaacagctgtatcaggcttatcacagtatagaagatgaccgcgattggacttatctcttcaaagcgcgtccggaaacagaggctgagtttcatgactatatgctaagcatgattaacgctaccgatgccgtgcattatgccgtgatggatacgcatggaggccatgtaataggcacagtggctttgatgcgtattgataataacaatggcgtaattgagataggctcggttaattggtctccattactgaaaagaaactctgccggaaccgaagccatatatcttttactcagctacgtgttcgataccttaggttatcgccgttgtgaatggaaatgtgattcctgcaatgagccttctcggaatgcggctaaacgctatggttttaaatacgaaggccaattcagacaggccatagtggtaaaagggcgtaatagagataccgattggttctcgattatcgatggtgaatggccggaggttaaacgagcgataacacaatggttatccacagaaaatttcactgctgacggaaaacaaaagagacgcttacaggattttcaaacggcgatttaagctattcgctgccttgagttattcaggcgattgcgtgttctatgagcagggaggcttatagggttaatgtgtacattggcactattgtcgattgctattatgttggagacaggcaaagggtaaataacggaaaccgaccatgttttaataagaacaaaaaacgtacagcataaataaattatatttttttacacttgcagcacgcgaaatgtgagagtgtcattatactgtaatcatctggcggtaattttcacacggtgtacagcttaggctgttgtttatcactgcgaggatcgctaatggtaaagtccttgtttgggctgttgagacaaaaccaagtatttactacagaaactcgttgtaacgagggccggctcaccgaccctgaattgtcaaccaagatccaaaaccctccctctgattttttatgttcatccctgataagttcctcctgcattaatctgaaccagacaaaacccagtacggtttatcgttcaggttatttgcattttttattggctcttattggctgcaaaggaagccaaaacctaatccgtatgtgaaacataatcgcgcaggcaatgactgctgcggtaggtgaaacaaactgtaaggtgccactatgggaagacaaaaagcagtgatcaaagctcgtcgtgaagcgaaacgcgtgattagacgtgattcacgtagtcatcgtcaacgtgaggaagagaatgtgacatcgttagttcaaatgggcggtgttgaatctatcggtatggcgcgagacagccgcgatacctccgctattttggcacgaaccgaagctcagggtcattacttggaagccatagccagtaaacagctcatctttgccaccggcgaagcgggatgtggtaagacttttattagtgctgccaaagcggcggaagcgctaattcataaagagatagataggattattgttaccagacctgtattgcaggctgatgaagatctgggtttcctgcccggtgatatttccgagaagtttgcgccttatttccgtccggtttatgacattctactacgccgtttaggatcgtcatttatgcaatattgcctgcgcccggaaatcggtaaagttgagattgctccctttgcctatatgcgcggacggacgtttgaaaatgcggtagtgattctggatgaagctcagaacgtaaccgccagtcagatgaaaatgtttctgacccgattgggtgaaaatgtgacggtaatcgttaacggtgatgttacccaatgcgatttaccgcgcggcgtgaaatctggcctcagtgatgcgctggaacgtttctccgaggatgaaatgatcggcattattcgtttcgacaaacaagactgcgtgcgttccgcattgtgccaacgcacattaaatgcctatacctgataatactgtcgcgagatgctaaaacagattgatggacgcggagctattttagaatcgacggtgggataggttggaataaacgctagcgtaattggcagtacaaccgctagccgttcaacaggtaggttgtacgacagactattttaatgttctacaggcctccgatattactatcgggggcctgattttttcaccgctgtcaggtatttttgctaaaaaaatgactcttgtgccgaaatattatcgtcaaacatgagatttgtcgctttgaagcgcaaggattccaaacgataaaatattggccttatttgcatcattcaatttcgctggcgtgaatcctcaggccttattagcactggctacgagagtgaatcagcaaaatctgggcgactctttggttatttaacccaaatggtgttcatgataaaacgcctgggcttaatgctgccttaataaagagtgggaagaggtgagatatggaaataaccactcgtctcattggtgtgtcgtcattaaaaatagggaaaccacgggcaggtctgctattgggtctgatattgttggtgggatgcacctcgcagcagcaaccaccgatggaacagcagagcgaaaaatatcaatatcgggttgggcacgaagtacgttctttggtttctttcgatggagaacagaattatgactgatgtgtgtccaatgggatattggatgccatagaacagcgtttatttggcacagtgcatttattcagttaacagctagtcaggcatcgtcggatataaataaaaagggcaagccataagcttgccctagattatttgtgtcgattcggaattacagcattatggtcatcatataagcggcgaacagtgccaaatgcgccgtgccgtttaacacgttggttctcccgctggagaacgacacctgacaaagcactaatacgctgaccatcaccaccatatggggggcttccagaccaaaggttaattcctgtccggttaataccgcaatcagggtaacggctggaaccgtcagggaaatagtggctaatacggaaccgaagaataggttcattgcccgctgaacctgattagccaatacggctttcaatgcgcccaaaccttctggtgacaggattaataaggcgatcaggaagccggtaaatttggccggcgcattcagttcagtcaataaactttccagcgggttggcgtcaaacttggtgaccgcaataacggcgatcaggtgtaccagcagccagcaggtatgccacaggctactgtgtgatgaaggttttccgtggtgcggatcgctcggatcatcgctttcatcttcgtgttcatagacaaacagactttggtgagtcttggtttgaataaccaggaagacgccgtacatggccgcagaaatcattgctacgactagcgcttgcgcgacgctgaaatttccgtcgggtagggtagaaggcaaaaccagaacaataatggctaatgggaatattgccattaaatattgtttgatgccgactaaattaacgtgctgagtggcaaattttcggccgcccaaaagcagagacacaccgaccagcccaccaatcacaatcataataatggaatataacgtatcccgcattagcgctggggcagcgtcacccgtggccatcatagcggaaattaagctcacctccagtaccacgacggagaggctaagaatcagcgatccgtagggttcaccgaggcgatgagccagcacgtcggcatggcgaaccacgctgaaagcgctgctaagaatggcgaccagagcaatcaggttaatgacaatgatagcggtgaagttgttggtatcgccccagacgttgagaatagccaatgcgataacaggtaaaatcagggaatactcatgatggcgagatttagatcggccaggatcgttttgcgacttcatttgaggtgcgctccttattattttatagctctaaagtggcgttaactccgtttgacgcacataaagcgactatttacaaaaaaaagagactaagattagcaaataacaagggtttggcagagtttctttacacgttttttaaaaaacaatgatatttggttaattagcttattaagaatggacatatcagggcgatatgtccaagtggatataggatttatttcgaaatttaaccgtcgagattatccatcacatcatggcgcttctgatggtaagcctcttcattcatcccttcgcgccagtaagggacggcgtaaagctgttcgcgttcacagcctttttcgcggcgcaaatagcggcgtagtagcaccactaacttgtcttcaccggccagccaaaacatcacattttccgtaggcaaggcgaaagaacagaattgagtgacgatttcatgagttttctcggttcctccgataacccaatttagctcaacgccagctggtttatctaaatccagcacatcatgcgcgctatctacgcgcacgatgacctgaccttgcgcgtgagcaggcaaggtttccaacagagcggcgatagctggcagggaggaagggtcgccaaccagataataatgcagtgctggaggtaacatcggctgtgggccaccgggattgctgatgccgatccagtcatttttctgagcatggcgggcaaaatctaccgccggacctggatgatcgtgcatggcgaattcaatatcaatttcaccggaagcagggcgcaccgcgcgtaccgtatacgtgcgtacaatcggccgcatttccccctccggccagatagggcctttatcggtcaacaccggcaatgcgggttgggtttgtcccggctgaggcaaaaatactttcagatgcgaagcggcgcagtctgctggatagtcagctaatgaatcactgtggaaagtaatacgtcgcaggtgtggtgaaatatccagcacttctttaacttgtatcaaacgaggtggcgtcgggcgtttcgcgggctgattggcggtggtgtctgtagtcactctctcatccttttcattctattggatattcagctaattggggcgcagcggaatagatgaaacaattgtatcactgagttgtgtgaatgataattatttgcatgaaccgaaagtgctatagaacgtgccgtgacgggattattgcgaatgactattaggtttgtaatttatctggctatgtattctgctgcgtcatccgactctggcagcgcagaatattaaatatcaggtactggcagaagaaagggatcaaggcgctatcgattatcagatttaaaagtaggcggcggggaaattcctccgcccgtatttatttaggatttcaatcaaactagatcgtcattatccggagtaaattgaattcgtacttcggtgccgccttctggccgctggcgtatttcacagtgtccgcccagattgttcgcgcgatcttgcataatcatcagcccgtagtggttgggccgtgcgctactgtcgccaatacccaacccattatcctgaaccaccatcaccacctcatcgttatcgcgataaacccgtatggaaacctcggtagcctgagcgtgtttatagatattgctcaaagcttcgcgagcgacctgcaccaaatgaatagactgatgaacaggaaccccatcattaggtaactgataatctagattaaccggaataccgatacgttcgctgaactcggcggcggttgcctctaacgcggcgcttagcgtagcttcgctcagtttaagccggaaggtggttaacaattctcttagctggcgataggcgatatttaactcttcgcgcatttgctgcatcaatatctgactggcttctggcagatccctggtttgctgctgcaggcaacttatctgaattttcaggcaggaaagggattgagcaatagaatcgtggagctcgcgggcaatggccgagcgttcgttcatgagtagtaattgctgttgatgtttagcctgactctcaagcgccagcgtactggtcaactgttctaccaacatgtggatcagctgcaactgttcatcactcaaagggtgattcaccggctgtttagccaataataagccgtattgttccagcttatcgctcaggctccaactcagggattcccactgttgatctggcgtcaaggcgttctccagctcgtgactgctgataatggttccctgggcagtatgcagcgggttggcctgaccttcgcccccatttttatacaggcaaatctgaatgtttttcagcggcgttaataacttcagctgattgattatgggttctaaacgatccgccagcggctggtgggtatgtaattcctggctgctttggtaaagaaaggccagcacctgatttttctgctgtaaatcagcggttttttcagccactcgctgttccaagtcggcataaatcaatgagagttcctgcgacatgcgatttaatgccagaccgagtgtgcccatttcgtcacggtgacgagtcagggaataacgatggctaaaatcccctcgggcaatggcattagccatggtgatcagttgcagccatgggcgaagcaaacggcgacgtagataaaaggttgtggcgagaagcaggatcagggtcagcgcgatgaaaatccattggatgacggataccagaacaatacgctgttccgttttgtgatcgatggcgagtaccagtgcatccaactggtggacgaaattggcaacctgctcagccgcgtcttcggggcgttgagcctgctgtaaacgaggtttaagagtttggatccagtactgatttagtcgctggtactgttcggttaatccttcccgctgtagggattgttgcaggtcagcgctggttttatcctgctccagcgcatcgagatagggtaaatcatggctatccagcggcaccatcgacagcaaacggtagctttgcatgcgtagtgacccggccttattgatagcgtgggcgttaccctgaatactttgagccatccacgaagagatactcatgccggccagtcccagcaggcctaaaaacagcattagcagggcaacctgattaacaatcgggatcaggtagcgtttcattcagcggaattcctttgagcaataaacgccgctaccttaccgtttttgtggataaagtgttagtgctaatggctcttcattcccgcagcggtcatcagcatacggaacagcatggagacggccagtagggctaatacgctgccgcaccaaatcaacaccagccagcccaattttttccaccaaggtgccggtgttgacagccttgtcgaagcgggagccgtttttttaaacataggatttcctgttgttcaaatgaatccgaacgggctgggatcgccagcccggagaaatcagtgatagccctgatcgtgattgatttttccccggaacacgtagtagctccagaaggtataaaccagaatgatcgggataataaacagcgcgccgaccagcataaagccgaggctttgcatgggcgcagcggcggcccagaaagtaatggatggcggaatcagataaggccagacgctgatgcccaaaccgctgtagccgaggaataccagtagcagcgtcagcaggaagggcgcatagtggccgcgatttttgacgctgcgcaacagcgcccaggtggcgaccaacaccagaataggcaccggcaggaaccagtacagattaggcaaactaaaccaacgttcggcaatttgcgggtgcgccaacggcgtccacaggctaatcgcgccgataaccagcagtaggagtaaggtcagcggcgtagccaagcgcagcatggtatcttgtaaatggccttcggttttcatcaccaaccaggtacagcccaacagcgagtaagccacgaccagccccaagccggagaacagagcgaaaggcgtcaaccagtcgaaagaaccgccggtataggcgcggcccgtgacttcaaacccgttgataaaggcgcccagaaccacgccttgggtaaaggtagccagcaatgatccgccaataaacgctttatcccagatatgctgtttttccggcgtagccttaaagcgaaattcgaaggcgacaccacggaaaatcagccctaatagcatcaaggtgagagggatggttagcgcgtccaaaatcaccgcataggccaaggggaatgcgccaaacagcgccgccccgccaagaaccagccaggtttcgttaccatcccaaactggggctacgctgttcatcatcaaatctctatcacggctgtctttcaccaacgggaaaagcatgccgatgcctagatcgaaaccatccatcaccacatacatcatggtgctgaaaacaataataacgaaccagattagtggaagatccatacccataattagctcctgcggctttcagaatggttattgtctaggctgtcactgacggcggacagcggtcgtgccggagtacgctgttggcctgggccgccttgttccggtgaatcaccttcgtgtttgaccgggcctttgcgaatcaggcgcatcatgtaggcgtaacccacgccaaacaccgagcaatacaccagcaggaaggcgagtagcgtgatgctcatatggatttcgccgtggccggaaaccgcatctttagttcgcatcaacccatagactacccaaggctggcgtcccatttcagtggtaaaccatccggccagcaaagcgatcaaaccggacggtcccatccacaggataaaatttaggaaagctcggttttggtataaaccgccgcgccagcgtaaccacagactccacacgccagccacaatcatcaacatccccaatgccaccataatacggaaggcccagaacaccgcgggtacgttagggcgatcttctggcgggaaggatttcagcgcgggcacctgtttatccaggctgtgagtcagaatcaggctacccaaataggggatttccagagcgaaatggtttttttcctgctccatatccggcagaccgaaaagcaccaacggcgttgcctcgccgggatgattctcccaatgtccttcgatagcggcaattttagctggctgatatttcagcgtattcaagccgtgtgcatcgccaatcagcgcctgaatcggcgcgacgatcagcgccatccacatcgccattgacagcattttacgcatggcggaagtatcgcgaccacggagtaaatgccaggcggcagacgccccgacaaagaaggcggaggacaggaaggcggcggtagacatgtgtgccaatcgataagggaatgacgggttaaagatcacttcaatccagtccagcggtaccacctgcccgttcaccacttcaaagccttgcggcgtttgcatccagctattggaggctaaaatccagaaggtggacatcagcgtgcccagcgccaccatgcaggtagcaaaaaagtgcaggccggggccaacgcgattccaaccgaacagcatcacaccaagaaaaccggcttcgaggaagaaggcggttaacacttcataagtcagcaaggggccggtgatactgccggcaaattcggagaaaaagctccaattggtgccgaactggtaggccataaccaaaccggacaccacgcccatgccgaagttaaccgcaaagattttcgaccagaaatggtaaagatcgcggtaatcctgatttttggtttttagccacagtccttccagcaccgccagaaagctggctaaaccgatagtgattgccggaaaaataatgtgaaacgaaacggtgaaagcgaactgaatgcgggccagttctagtgcagttaacccaaacatagggaccccttatcaaacatggtacttccttttatttttcatagcggtatatcgcaataacgcggcaggtgatggttatcgccgtgaaacagatagcgccgaaccggaaaaccctgtccctgtgggagaattattcgaggcaattgctgagatcctaaaccggtcatgcggcgggttcatcaatgcccgaggcggtttttcgggctggcgggcttggcagcaagttaaccacaggttaaagtaggtataatagtgacagttaacgcaatattacctataacagatgaattatgacccgatatgagcaattagccagccagattcgtacccaaattcagtcaaaagtatggcaggccggggataaactgccatcgctacgagaaagttgtaagcaatctgggctgagtctgatgacggtggtgcagtcataccaactgctggaaagtcagggctggatcgtggcgcggccgcagtctggttactatgtggcatctcgacctacccaactaccgcagccgcaacgcggtaccaagctgcatttgtccgagcaggtagatatcaacgcctttatctttgatgtgctacaggcggggaaagattcggcgattatcccatttggttctgctttccccgatcccagtttgttactgcaaccgcggttatccaaagcgctggccagcgtagcgcggaaaatatcgccacaaagctcggtcactaacctgccgccgggtaacgagagcctgcgaaggaatattgcccaacgctacgccgccagcggtatgaatgtttcgccggaagaaattgtgattaccgcgggcgcaatggagtctctgagcctgagtttgcaggcggtgacggagccgggagactgggtcgtgattgaatcgccggcattttatggcgcattacaggccatcgagcgtttgcgattaaaagccattgccattaccactcatccgcagttgggtatcgatctggattctttggagcaggttatcggccaatatccgattaaagcttgctggctgatgactcatttccagaatccgctgggttccaccatgccgtggagccataaacagcggttggtcaacctgttacagcagaataatatctcgctaatagaagatgacgtgtatggcgagctgtattttggtgcggaacgaccactgcccgccaaggcgttggatcagcatcgtcaaattttgcactgttcctccttttccaaatgtctggcacccggttttcgcgtcgggtgggtggctgcgggggctcacgctcagcgtattcagcatttacaactgatgagcaccgtatctgccagtgtgcccactcaactggctattgccgattatctcactcaaggtgggtacgatacgcatctgcgccgcctgcggcgggtgatggaacagcgattgaacaccatgcatcaggcggttgcagaagctttcccgcaaaacgtgaaaatcagtcatcccggcggtggtttctttttatgggtagaaatggaaccgccgtttaataccaatgaactttatctacgcgcgttagagcaggggatcagcattgcgccagggaggatgttcactaccgggaagcagtttgatcactgtttccgcctcaatgcctccttcccatggagcagccacagcgagcaggctattaaaaccctcggccaactggtttatcagctcagtgcgcgtcgttagagagggatattcacagcgcgaacacgcttaactcttttccaaccaaatcgcgggtgagaataatgctcacccatcgacctgctaccagacacaaattcgacagaacaaacgcactaaattgacgcattcaccgcccatatatagggcgttagcatacacgcctgttattattgtgttgcataaatgtgatcgtgcagagcaaaaatagaacttcacattatttgaataatgtttcgcctagcccccggtaattacgccattccttgataaattaatgcacgataaattgcatcttttgcataattatgcattttaaactcttgtttttacgaaaaaaatacattttattcacatattgggcttgctagcataaaagctgctctacactttatatcaagtgaatctgtttcattctgaatagttaacaggatatacgaaaggcgactcaatcgacttcggtagtcgccatttcgcgacataacatgttacctccgccgtactcactccatcaatgtgaggcgacggcggcaaaagagagtgccattggctcgccagtaagcattcacaccccaaactcatgctgagaaagaggtttatatggaacagccaatcccggtcacccgccaatcatttgatgaatggctagtgccaacctatgcgccggctgactttattccggttcgtggcgaaggcgcaaccctgtgggatcaagaaggaaaatcttacatcgattttgccggtggtattgcggtcaatgccttgggacacggacatccggcgcttaaagctgccttgcatgaacaggcggaaaaactgtggcatttgggcaatggttataccaatgaaccggtgctgcggttagccaagcaactgattgacgcgacttttgctgaaaaggtttttttctgtaactccggtgcggaggccaacgaagcggcgctgaagctggcgcgtaagtatgcgttagatacctacgccaacctgccggggcaagtgggcgagaaaaatcagatcgtggctttccgcaacgcgtttcatggccgcacgctattcaccgtttctgctggtggacagccaaaatattcgcaggattttgctccgctgccaggcggtatcagtcatggcatttttaacgatctggcctcggcggaagcgttgatcaatcagcaaacctgcgcggtgattgtcgagccgattcagggggaaggtggcgtggttccggcggacgccgaattcctgcgcggactgcgtgctttatgcgatcgccataacgctttgctgatttttgatgaagttcaaaccggcgtcggccgtaccggcgaactctatgcctatatgcattacggcgtaacgccggacgtattaaccagtgccaaagccttggggggcggcttcccaattgctgccatgctgaccaccaaccgttttgccggtgcgctcaacgttggtagccacggaaccacttacggcggcaacccgctggcctgcgccgtggcgggaaccgtactgcggttgatcaacacacccgaagtgctatccggcgtgaagcagcgtcatcagtggttccagcagggattggcaaacattaacgcccgttatcccgtgttctccgagatccgcggtagcggtttactgattggctgcgtgttaaaacgcgaatatgccggtcaatccaaagccattattcaggccgcggccaaacacgggctgatttcgctgattgccgggccggacgtggtgcggtttgctccttctctcatcatttctcaatcagacgtcgaagagggactggcacgtcttgcccgtgggattgcgcaggtttgccagtaggattaacgccgtaaaaaaggaccttgattatgatgattattcgcccggtagaacgtcgggatctggccgatatcctggaactggctggaaaaactggcgtcggcatgacttctctgccacaaaatgagcaacatctcgcagcacgcattgaacgggcgttaaacacctggcaaggaactttggctccgggcgaacaggggtacctgttcgttttggaagacactgagcgtcaaaaggtggtgggcgtcagcgcgattgaggttgccgttggcatgaacgatccttggtacaactttcgcgtggggacgctggtacatgcgtcgaaaaccctcaatgtctacaagtcggtgccgacgctctttttgagcaacgaccacacgggctacagcgaactgtgtactttatttctcgatcctgaatatcgccagggaaaaaatggtcctttcctttctaaagtgcgctttctgtttattgccgctttccgccagttattctcgcgcaagctgatcgcggaaatgcgtggttttaccgatgaacaggggcgctccccgttttgggaaaacgtcggacgccatttcttttctattgaatttgccaaagcggattatctgagcggcactggtcagaaagcctttattgcggaattgatgccgaaacatccgctttacgtagattttctggcggccgaagcacaggcggttattggccaggtacatcctcatactgcgccagcgcgagcggtgttggaaaccgaaggcctgcaataccaagggtatgtggacatttttgacggtggtccaacgctggaagccaatacggatgaaatccgtgcagtgcgccaaagtaccaaacggcaggtttctattgatgatgtcattctagacggcagcggcaccgcttatctggtagcgaatgatgattatcatcactttcgtgcgctgttgattcacaccgatttgactgacgaggttctgcacctcaacgctgaaagtgcggccgcgcttggcgtggaacagggcggaacggttcgtctggtcagcttattttccccggagacacgaaaatgacccatgctgcactttttattcaaggggaatggcacaccggcaagggtgagcctttcgcaaaacacgatccgatggatcagcaattattgtggcaagcccgtgcagccgatgagcaggatgttgccaaagcttgtcaggcggcgcgagcggctttcccgatttgggcgaaaacgtcgttagcgcagcgagtggaaattattcagcgttttgccgtactgctggaacagcataaacagcaactggcacgcaccatcagtctggaaaccagcaaacctcattgggaaacgctgacagaaattcaggccatgattggcaaggtgaatatttcactgcaagctcatcaagttcgtaccggcaccagcgaatcgccaatggccgacgcgcgctccgtggtgcgccatcgacctcacggtgtactggcagtgtttggcccgtacaattttcccggccacttacccaatgggcatatagtcccggcattgttggcaggtaatacgctggtgtttaaacctagcgaactgacaccgaaaactgcggaagaaactgtcaaactttggcaacaggctggaattccgccgggcgtactgaatctggttcagggcggacgggataccggcatcgcgctagccggacagaatgatatcgatggcgtgctgtttaccggcagcgccgctaccggctatcagttgcatcgtcaactggctggacagccggagaaaatgctggcgttggagatgggcggtaacaatgcgctgattgtcgaacaaattgatgaccgagatgcggcggtgaatttggcgatccagtctgggtttatttctgccggtcagcgctgtacctgctcgcggcggattttggtaaaacgcggtgcagaaggcgatgctttcttgcaacgttttatcgccgtggcgcagtcgctgcggattggccgttgggatcagcagccgcagccgtttatgggcgcggtgatctcccctcaggcggcggagcgtatgatggatgcgcaggaaactctgatcaaactgggcgggaaagccttgctgactatgaccagaccagacgcgcagggcgcggtgctgacaccgggaattattgatatcaccggcgtgaatgacgtgccggatgaggaatattttggccctttggtctgcattattcgttatgacaatttcgatcgagcgttagagattgccaatcagacccgtttcggtctggccgttgggctggtttctccaaatcgtcgccagtttgagcaactgctgcaggaagcacgggccggtatcgtcaactggaataaaccgttgaccggcgcctccagcgctgcgccgttcggtggtgtgggcgcatcgggtaatcatcgccccagtgcgttttacgctgcggattactgcgcctggccgatggcatcgctggaaagcgagagcctgacgttgccagcgactttatcaccgggcatctcgtttgatgtgaccgatcctctataagccgcggcggagaagccctatggcaggatatgaattaaatctcgatggattggtcgggctaactcatcactatgctggattatctttcggcaatgaagcctcgactcagcataaaaatagcctgtccaatccgaagctggcggctaaacaaggcttgttgaaaatgaaaacgctggcggatctgggttacccgcagggcgtgatgccgccgcaggaacggccattcttacccgctttacggcagctagggttcagcggttctgatgggcaggttttgagtcaggtagtgcgggaagcgcccagactcttgtctgcggtaagttcggcttcttctatgtggactgccaatgctgcaactgtctccccatcggcggatagcgccgacggtcgggtgcattttaccgccgccaatttgaacaataaattccatcgggcaatcgaggcggaaacaacgagcgcgctattgcagcgtattttcaatcatcatcgtcactttgttcatcatcaggcgctgccgggaggggaactgtttggtgatgaaggcgctgccaaccataaccgcctcggcggtgattacgatcggccaggggtgcaagtgttcgtctacggtaggcggggtatgacgaccggttctgccccgagtcgttatccggcgcgacaaacgcttgaagccagtcaggccgtggcgcgattgcatcagctggatcccggtcgcacatttttccttcagcaaaatccagaggttatcgatcgcggtgtctttcataacgatgtcatcgcggtcagcaatcaacaggttcttttttaccatcaacaggcttttatggcgggggacagtgctctggaaccattgcgccgccaaatgggcgaaatggagtatcagctagacgccatacaagtgccgacggagcgagtttcggtggctgatgcggtctctacctacctgtttaacagtcagttactgcgtaagaacaacggaaaaatgcttctggtgattccgcaggagtcgcgggatcacgcgggtgtctggcgctatttatccgagttagtggcgagcggcggggcgattgacgaaatcaaggttttcgatctgcgggaaagtatgcgcaacggcggcggcccggcctgtctgcggctgcgggtcgcgctgaacgaaactgaacttaaggcggtgaatcctcgcgtaatgatgacccccgctctttttgccacgctcaatgattgggtcgatcgtcattatcgcgatcgattgcagctcagtgatttggccgatccgcaattactacaggaagggcatcaggcgctggacgaattgacgcggattctggatttgggatcggtgtaccactttcagcaaaactcatttcatggatgataaggagtcttcatgttggatttgttaactctgactttatctgcgcgtcaaccggtgaacgatcaggggagaacggcacagtttcgctggcattggctgggagaaggcatgctggaactgtgcccgttaggcgaatatcaacaggcggtagtgctgtctgccggtattcacggtaatgaaactgcgccgatcgagctgctaaatcaattggttggcgatttgtttcttggacgcctccagttaaatgttcgcttgctgattttattgggaaatcctgcggcgattcgcgtcgcaaagcgttatctcgaacatgatatcaatcggatgtttggcggccgccatcaggactttcctgaatctatcgaaagagagcgagctcagatagtggaacaggccgtttcccaattttttagcactgaaaaggtgcatcagcggctgcattatgatttacacacggcaattcgtggttcctatcatactcgtttcggcttactgccttatcaggggcgtccgtattcatcagagttatatcgctggctacagcatatcgaactggatgccttagtcatgcatacctctgcagggggaaccttttccaattacaccagtgaatactgggaggcagacagttgtacgctagagctggggaaagcgttaccgtttggacagaacgacttggctcaattcgctggaatcaatcgaggattgcaggggctagttagcggcgcacctttgccggaaagggcgccggatgcgccgatgttgttgtatcgcgtggtgaaatctttgatcaaaaccgatgcaaacttctgtttgcacgtggccgacgaaaccctcaattttgcgcgttttgcctacgggcgattgttaatggagcagtccagtggaaattaccgggtcgaacatccttacgaatggctattgtttcccaatccgcacgttgcccaaggactgcgcgcgggcctgatgctggtgcgcatggacgaaacggagctaccgcaacgctaacagcatatgaatttaaggaatataagaaatataagaaatataaggaaaggagagctgtgtgtcaggtggcaatgaataccgattgccacctgacatacagagtgtattaatgaaattagttaatgcattaaatgttaaaattaatcacgcaggttaatatcactttcggacaggcaggttcagcactctgtaatagtaatgtcataataatacctgctagattaaaaccagtgtttaatactgcttaaattctcattattagcataatcatcacatcaaataatgcatgagtggcacgttgttattgatgattttattaactgcttaattaaccatgcgatttataaagttattatttctctcaattaacgctttcctattgggattggctttaggtgaatcattcatttatttttgcattgcttcaaagaacagaaataattttgctgatctgaatgtttacaatagcagggcgcaatagcctcaaatttttcatcatgttgaccatgccgcataaaaaagaaacaaaaagaaacacttgtgcactattttggtgcggtcgcactcttttggatatccgtgtttgcattaaattcattaataatcagtgtattataaaagttcctcaaaacacattttgttacaattaataaactgtttatgacgatatttctgcaatttttccattttatcttttttcgcttaatgctaatgtctcttggctttacatttatttgtcactataaaaaattaaaacttaaccactaggccgctcaaatatatttgatggcgatgagttaaatttatataaaattcaaggaaaataatgatgaaacgcagtgttctggccctggccgtctccttaagcttgatcccatcgctgtctaacgcagctgaaatctataataaagatggtaataaacttgacctgtatggtcgtgtggctgcgaaacatctgttcagcaaagataaaggaagcgacggtgacttcacttacgtccgtttaggttttaaaggcgaaactcaaattaatagccaactgaccggttacggtcagtgggaatataacattcaggctaacaacgctgaatctcaaggtgataaaggcaataaaacccgtctgggctttgccggtctgaaatttgctgaattcggttcattcgattacggtcgtaactacggcgtagtgtatgacacgctggcgtataccgatatgctccctgagttcggcggtgattccatgtccttcaccgacaacaacatgacaggccgttctaccggtttagccacttaccgtaacagcaatttcttcggtctggttgaaggcttgaacgttgccgttcagtaccaaggtaaaaatgacgaaacgctggttggcgcgaacaatggccgtgcaattcagaaagctaacggcgacggttttggtctgtccgttgactatcaggatatcggtggttcaggtatcggcgctgcggcatcttactcttcttccaaccgtactttaggtcaaaaaactctggctaacagcgcaaccggtgataaagctcaggcatgggcaaccgcgttgaaatacgatgctaacaaggtttacatcgctgcgatgtacggtgaaactcgtaatatgacgccatacggcagcgtgatcgcaaccaaaacccaaaacgtggaattggtagcacagtatcagttcgaaaacggcatccgtccttctttgggttacgtacagtctaaaggcaaggatctggttggcgttgctggcggcgatgcggatctgttgaaatatgttgatatcggtgtgacttactacatcaacaaaaacctgtacacctacgttgactaccaaatcaaccagctgaacgatgacaacaaactgggtctgggcaccgacgacgtagtcgcggcagcgttggtttaccgtttctaagttgtcaaagcagtcattattacccttttctgtgtcggaaattggtgaaagttaagaagcgggggcaactccgcttttttattgaaagataaaaaagccacctttgatggggtggctttttttttgtttagcgctcgaagaaatgtttagtgactaccgctttcctgctggcgcccccacagaatcatgctgcctaccagttgtttcagtaatccctgtaatgcctcggctttacctacgttgaattcataaggctcggtttcggacatgtaattgagttgagccagttccaactgcactgcgtgttgttgcaactgcggttgaccataggctcgggtgatatatccacctttaaatctaccattcaatatatgcgtgaaagtcgtttgctgctgacagcaggcaatcaaacgttcgcttaaactgctggcgcagctctgaccgtcgttggttccccagttcagatcaggtagctggccttcaaacaggcgaggaataaccgaagcaatagaatgtgcgtctaacagcagagcatagccaaaccgagcttttagtcgatccagctcttgctgtaactgctggtgataaggctgccaaatagcttcaagatagccttggcgttcgctgtctgagggtatttgttccggttcaaaacaagggcggccatcgaacaaggtctcgggaaacagaccggtagttgccgtggtatacagtggttgatcgtcggatggacggttgagatctatcaccagccgtgaataattgccagccaacagactggcacccatatctttagcaaatgaataaagacgtggaatatgccagtcagtatcagatagcgggcgagccgcatcgctaagcccggcctcaaccgctggcgtcaggcgagttcccgcatggggaatactgattaataaaggtaattcaccggcgtgaaagctgatgggatcggcgatgatcatgggcgaacctctcctcgatagaccacggtggcagggagctgtccgcccagccagtaagataattcggctggacgagataacggccagtgtacccagttggcgagtttgccgacttccagagttccctgtgtttcctgaacgcccagcgcctgcgcgccgtggcaggtcacgccagctagcgcttcttccggcgtcatgcgaaataacgtacaggccatgtttaacatcaggcgtaatgacagcgccggagaggtgccggggttagcgtcgctggctaacgccataggcacgcgatagtgacggaaaagcgctaccggaggacactgggtttctcgcagcatgtaataggctccgggcagcaacaccgcgacagtgcccgatgcggccattgcctgtgcgtcttgctcggtggcgtattccagatgatcggcagacagagcgtgatgccgcgctgccagcgtgctgccacctaatgaggaaagctgctccgcatggagtttgatcggtaaacccgccgtttttgccgcatggaaaactcgctctacctgagtgggtgaaaacgctaaatgttcgcaaaaagcatcaaccgcgtcggccagcccggcttcggcaacctgcggaataatggtattacacaccagatcgatataatcgtcggctcgattagcatattccgacggcagagcgtgggcagccagacaggtggtttttacctcgaccggcagcatttcgccaagccggcgagcgacccgcagcattttcagctcgctttgcaaactcagaccgtagccggatttgatttccagacaggtaacgccttcggccagcagcggtttaatgcgaaacaacgcctgttccagcagttcatcttcgctggtttgtcgggttgcatttaccgtggaaataatcccaccgccttgagcggcgatctcggcataactcacgccgtttaagcgttgttcgaattcgctgctgcggtcgccgccaaaaaccagatgtgtatggcaatcaattaagccgggagtaatgattccgccgggaaaagtcatttcccgcgaggctctcacggcaggcaaagcggcgcgcgtgccaatccagataattttcccatcatgaacggcaatcacaccgtcgctaatagtgtgatagtggccgccgcgcatagtgacgatatcggctccagaccacaagctgtcgcagtaaattacagacgccatctttatcctccgccccgcggggcgatacagttgtatatacaatcaaagacaacctagcctataaatccaaggtcagcaaccggcaacatgcagcaatttgcgctatcacacctttaatttgttatcaggatgttagggttccctgtggtgtaaaacgaccaaatagttgatagcgggaaccggggtacagcagttgagcggaagtgactacggctttgccgaaccaggtacgacggcgaatcaataaacatggctcattttcatttaacgccagtaacttacgttctaccggccccggcatgacggcctcgacaatatgctcgccttcggtcaatggcgcggcctgcgtcagatagctgtagggtgtgatgcggctaaaatcttgctgcatataatcgggagcggtcagcgggttgacgcagcgattttctacctgcaccggaatatcgttctcaaagtgaacaatctgggagtagaacagctgctgtccggccagaatgcccaaggcgattgcttcttcctccgtagcgggacgagcttccagcagtagaattttgctgctgtggcgatgcccgcgcgcggcaatttcatcagcaatattgtgtacggccagcaatgcactgtgtgccttggcttcggccacgaaggtgcccacgccttgcattcgaaccagaaaaccctcactggtgagttcccgtaacgcgcggttgatggtcatgcggctaacgcctaattccgccactaattcactttctgagggaacgcgctgatggggttgccaagcgccagaacggatttgccgaatgatggcctgtttaaccctcagataaataggggcaggagcgtcatccataacgctggtgagttgtaataggcactgttgttcagccacggcgttaacctcgtcaaagaaataataataagataagtctacggttgaatttagcgtatgtatatgtatatacaagtaggcgaattaatttattgacgcgactgtgtctcggcgcgtttgagtgtcatcacaaccttgggattcactatgcctgcatattttgccaaacgcgcttttttacccgacggatgggccacggatgttcgtttggaggtcgacgcacaggggcatatttcgcaaattatcaccggtggacgcgacgctggctgcctgctgctaggcgggccaatcctgcccggtatgcctaatcttcattcccacgcttttcagcgcatgatgtcggggctggctgaaattgccggagatccgcaggatagcttctggacatggcgcgatttaatgtaccgattagtccagcgtctgacccctgagcaggtcggtattattgcccgtcagctgtacattgagatgctgaagggcggttacactcaggtggctgagttccattatttgcaccatgccccggatggtaaaccttacgcagatagcggggagatgaccgggcaactcagtcaggctgcggaacaagccgggattggcatgacgctgttacctgtgttgtatcgctacgccggatttggcgggcagcccgcgcagcccggtcaaaggcgctttattcaggatgtagagagttatttgcagcaacagcagaaaattgcccaacagatacggcatcaaccactacaaaatcaagggttatgttttcattcgctgcgagcggtagagttggagcaaatgcagcaaatactggccgtgtcggataaacagttgccggtgcatattcatatcgctgagcagcaaaaagaggtgaatgactgtctggcatggagcggtcaacgacccgtggcttggttatataatcatttaccggtagatagccgctggtgtctggtgcatgccactcatctggataatgacgaattatccgcgctggctgccagtcatgcagtagcggggctttgcccaaccacagaggccaatctgggcgacggtattttcccgggggttgaatacattcaacatcatgggcgctggggaattggttccgatagtcacgtttcactcaatgtggtggaagaactgcgctggctggaatatgggcagcggctacgagatcagcggcgtaatcgcttgaccagccctgagcaaccggcggtggctgatttgctgtatagccaggcgttatccggcggtgcgcaggcctgcggtacccaaattggagcattggcggtcggctatcgagccgattggttggtgttggacggtgacgatccttacattgccggcacaccttcatcgtcgttactgaatcgctggctttttgccggtgataaatcgcagatccgcgatgtgtacgtaggtggtaagccggtgattattggcggtttccatccgttacagcagctgagcgctcaggcatttttggcggtgctgaaagactgcctgcgggaggctttttaatgagtctgacattttttgattatgccagtttacccgtgagtcgctggcgcaatggcgggggagaaacccgtgaaattgcctgctggccggtaggtggcgaggattttggctggcgagccagcattgcgaccattgaacaaaacgggccgttctccacctttcctgaggttgaacgttcgataaccttattggcgggtgacggagtcaggttatttagcgcagagggtcatattgatcacgaactcgctcaatctttgcagccattctcgttcccgggggatattgcgctggaggcgacattgctcggaggtaacagtcaggattttaatatcatgacgcgaagaggctgctggcgcgcggatgtctgcatcatttctggtgcgcagccattgcccgtcagtcgtgccggtgtggtgtatgtggttcgcggtgattggcagattcaacacgaggaaagccgccggttatctcatcaacagggttgttggtggacgccaatgattagagggggacaattgcgtcccctggtcgcgaatagccagctaatttgggttgatttattatccgcagtttagtttgataatcaacgggtatgttttttgaatgatatttacacgcaccaataaaggggggctccctttgttgggcaatgatgatttatgttattaacatgaagagatttaatatttcatgtgtttatcggtatctaataatataaagaaattccgatgacgtttttcattgtgcatttttatatctacattttttaatcttcgatggtgtcatttaatgtctgtttagtaggggagttttcattttgattgatgaaattgacagctatttactcgcggcttaataagattaataacgggcgatgtgttcgccatattagctcactagcgagtgttagtgttttaggtgtttgctttttttattatttaatatctttcagtgggatagcggagtcggtttgttaactgtaattgattctctatcaggcgttccctgatgtcagtgacgacttttcccgacggttaaatagatataaatacctagttattaataatgaattatttatggataatgttttttattagaattaccatccttttatttttatggctaagaaatggttaacgtccagtacatgataattaatatttgtttttttatgttcaggtgatatgttgatatgtaacgcttcaattgtttgttgggtcatgatgagattttcttgaagtttactttcgtttttttgtttgtcgaaaatctctaaaactattgtgaagtataatcagcattttaattttttgtaataagtccatccgtgtaatggcgcaccaggggagtcgctttagatatgtttttttaactattaacttttcctattattgctattgcacttacggatattcatcttgtgatttcaaatcatcaccacatggttgggggaatataccagacgcttaccgtttatacggtgtcattttagctgtccagcactgagggaaaattgatttatctggcgtaactaggggcgtcgttaacggagagggcgcaatgaaccaatcgggatgatacaaatattcgcccagttaatgaatgaacaataaaggatttttaatcagagggaatcatatggcatcagatgacactgcggcggtattgctttctcggttgcgagctgcggggctcgtgctgtgggaggaagatggagagttgcactatcgggcacctgaaggttcactgacgccagcggatttgaaatcgttacgagcagccaagccattgttattaaaccagttgttggcagaacgggataaattcattctgcttgaaaataccgctgagcgttaccagccttttcctctgacagatgtgcaggccaattatcttttagggcgtgaaaatgtttatggctacggcggcattgggtgccacgtctatctggaggtcacctatccagatttagttgctacaagaacggaaaacgtttggaatcagctcattgcgcggcatgatatgctgcgagtcgtgatggaagccagcgacagtcagcggattttatctaaggttcccttttttaccattccctgtggggatatgaggaacctcacgagcgcgcaagcgcaaaccgcattggatcgaatacgagctgaactcagccataagaaatacgatccgcaacagtggccactgtttgaaataagaatcagccgaactgctgaatacagcgtattacatttgtcggtggatttattaatggccgattggtccagtatttgccttcttttagctgaatttgaaggactgtatgcccaacctgacaaagccttagatccgatagatgtcactttccgggattatttactagcagagcggaagttgcgcggtagcccaacgtacagtcgcgatcggcaatattggttgcaaagcttggctaatttcccctctgcccctgagttgccgcgcgccgaacatcttcctcaacctgagaatgcccgttttcggcggcgtcatctgaggcttgataatgaggactggctggatttaaagcagcatgcaacggcacacgggttaagtcctacctccattatattaaccgctttctctgcggttattgcgcgttggagtctgaacaaaaagttttgcctgagcttaacggtgctaaatcgtttggctgcctatccgcaaatagagcaggtcgttggaaattttacatccgtcagcctatttcccgttgactggcagtcagatagttcttttgcgcaacaggccgccgctatcagcgcacagctttttgctaatctggatcatcgtctattttcaggcattgaggtgttgcgggagttggttaggcagaaagggcgaggggccgcgctcatgccggttgtattcaccagcgcaattgggctaagggattataactctttgctgagtagcgatggtcgtttggatgggcgcggtatcacgcaggcacctcaggtatttattgattgccaagcggcagatgacgcgcacggattacagattaactgggatatccgtgagggaatatttcctatgggaatggcggatgacatgtttgacgtcttcaccgagttgttgcttgggctcgttgattccgttggtctctggcggcaaaaatatcagctaccgcttccggcatggcagcgaaaagaacggcaaaaagccaacagtaccatgatgaaaatcacctcgaagctgttgcatcaggccatatttcagcaggctgaacgaacgccgggagccgcagctgttatcgattcacaacaatcagttagctatggcgaattggctgaacgagccagggcggtggcgaatcgtttgcaactgttaggatgtcgtagcggtgaatgcgttgcggtggtgatgaataaaggtgcggaacagatatcggcgttattaggcattttttccgtgggtgctgtttatgtcccaattgatgtagggcaaccggaagtacgccgttttttcatccttaaagatgccggatgcaggctggtattgaccacgtcagagatgaccatgcgttggcctgcagaattgaaacgggtagatattgatcgtcttaaatctcagtgtcatgacatcatggttccgacaataacgtcagaatcgccagcttatgtcatttatacatcaggctcctcggggcaacccaagggcgtaacggtatctcatcgttccgcgctaaataccatattggatattaaccgcaagtttaaagtttcctctcaggatcgagtgttgggcttggctcatttggattttgacctctcgatttatgatgcactcggcctgctttctgttggaggctccttggtttatccgcgatctcatcgtgcatccgcatctgacccggctcattgggttgaattgatgctcaaacatagcatcacgctatggaatacggttccagcaatgatccaaatgctggagacttatttaaccagtatgccaccgattcgtatgccagcttggcgtttggcattagtttccggcgactgggtgcggcctggtttacctgacgccctaaaggctcggttcccacagcttcaactggttgtattgggtggggcgacggaagccgcgatttggtcaaactatcattgttatcaaggcgctcaaccggggtggcgcagtattccgtacggttttcctttagccaatcagagattgcacgttctggatgagaacacgcatgattgcccggtttggagtaaaggtgagatttatatcggtggtgacggggtagcgataggctatataggggatgaattcacaacatcccagcgctttataacccataaggaaacacattctcggttgtttcgcagtggcgactttgggcgctatcttccaggaggcgaaattgagtttctggggcgtgaagactgccaaaccaaaatcaacggacaacgcattgagctgggtgaaattgaatcggtactgtgtcagcatccaggcgtagccgccgctggggtggcgatcagcgagtttgaaggtcatatttcactctttgccgcagtagaaacacgccaatccaccgttcagcctgatccgataccaatacactttaaccttgagcgacgaaataggttggagtaccgcactaaacatatcttatatgaatacaccgcttctcaagttgttgctgcgttagagtcactcaacgaggctatgttggactcaatgcgttcggctctattacagttagggctatttgcgctaaatgacagggaaaagacagaacaatggataggtgatagtgcgatctcccccgatttctattggctcatagaacgatggtttgcggtgctattaactgaaaaatggttactaaaaaactctgatggttccgtcatgctggctaaccgaataaatcaaaatgaggggcatcatcgctggcgaaaagctgaatgtttatggaataacgttctggccaactcggagtttcttggctatctgaaacgttgtgctgacagcttaccggcgctattgaaggggacgctggatgccaaaaacctgttgctaccacagggcaatatggctgtcgttcaggcattgtattgcgaaaatatgatggcgcagtatctcaatgatacggtgcgtgatctaatcggcaatattgcgtcagatcgtttatctaatcgacgtttacgaatacttgaggtcggcgcaggaagtggttcgatgactcaggcagtattatcgatttttcgtaactattccgttgattatctgttcaccgacatatccacctttttcctttcggaagcacgcgcaaatttcggtagttttcccgatatctcattcacccgattcgatattgaacaggattaccgcagtcaggggctacagccaaatgggtttgacattgtgctagtcgatggcgtgctgggaaacatcagtcatctggaggaggccttatgccaattgattgagctggcagcgccgggcgcctggctaatcctggctgaatccacgcaggaacatccgtggatactggcttcacaggcttttatgatgaagagcaaaacggggttatcacgttctcaggccgcttatttaaaccgaaacgactggctgacccggcttgctaactataccgacggagaagttatttgcttacccgaatcgtcgcatccgctgttttctttggggcagcatatatttgccgcgcggttaaaaactcagcgtgcttttcttacagtgactcagatcggtgcctttcttcggatgcggcttcctgattatatgattccggagcagtggcaaatagtggataaattaccagtaaccgccaacagtaagctggatcgcaaacaattacgtcggtggcaaatggctgcgtggcaacattatcaacgccagccaacgacatcgggtaatgcgaatctattaaataacaagctggctgaaatgtggagaaatgcgttaggggtgacgcaactgacacaatcgcagaatctgtatgaaatgggggccgattctctgattatggcgcggatggccaggcgaatgcgtgaacagctaaaaggagcgccatatggtgttgatgagatcccttttgatgcattgttatatctaatgctaaatcaaccaaccattgaagcactggcagaatttatttggcattaccccaaaatgtcggcaatgaatattggccatcagcacactgctattggcggagaaaatactaaaccctttcgaagtaacggcatattttatcactatggaggaggtaataccgatgttacccgcatagtctttcacgcgggtttaggttcaatggacagcttccaaccgttattgacggaaatggctgagcaatctgtgggggcggtgatcggtattagcgtcgctgacgataagaaatattgtgctctagatacagaaaggttggttgaacgaattgcggatgattatgccaccttcttacttgctgccggatatcaacagctccaacttttagggtactgtctgggagggctttatgccgttgaagttgcccgacgtttaaaagaccgtggcgttaacatcctggacttggtgttagtcagcagtcatccggtgcgctttgaagtccacgatgaattgatgatcgaaatgttgtttctgcccaatctgagcatctcaatagagcagttagaattaggtgccataaatagcagcctattggttcagggttttatgcaggttattgaagctaataatggggtcatccccatggattcgttaggtacgataggtaacgggggaaacttggatcaggtaggcgaactgtttagaacgttgaacacccaaactcgccgtcaacgatttgaatgttatgttgctgctaaggcacgtcacattgggcaaactatgccggtggagaaggctatggagctttttaccgtctttcgccaaagctttctctctgggcgcttcacgcccacaccttatttgggtgatattcgttttttgctacctcagcaaggttatgatttcgcgccaggaattgatagtcagacattagcgttttggcgtgagatctgtttagggacaatgaaagtaactcatattgaaggaaatcatttcagctgtattgccgcagaaaatgtggcgtcattggcccgtttaattgctttaccatttcagaagtaaatgaggggcattgaatagacccgggtttcgtaggcacttttttgcctcataatggaggctcaatgaaggagtgtttatgtcagccaaaaatttcactgaagaattcaaaattgaagccgtacaacagattagcgagcagggataccctgtttctgaggttgcggcacgactcggtgtttctaccaacagcctttacgcgtggattaagcgttaccaaaaacctgaaccacagcgaaagcaggacgatgcccttcagcacgaagtaaagcgccgcaggcaagaacttaagcgtgtgactgaagagcgagatattttaaaaaaggccgccgcgtactttgcaagaacgtcaggctgaagtacgccttcattaaacaaatgtcctccttttatgctgtacgccggttgtgtctggttcttggcctccattacagcggttattaccagtggctaaagcgacctcaatctttgcgtgccaggcaagatgagcgccaaacaggtcttattaagcagctgtggcttgaaagtggtacggtttatggttatcgaaaaatctggctcgatatgaaagacttgggtgaacgcgctgggcgtaacaggatcgcgcgcctaatgaggcttgcagagttggcttctcaaaccggataccggaaacgacgctattacggcggcggaaagccttcagttgccagccctaattaccttgagcgccagttcattgttcctaccccaaatactcattgggtgagtgacatgacctatataagaacgcatgagggttggttgtatctggccgttgttctcgatctcttctcgcgccgggttatcggctggagtatgggtggacgaatgacagcagagttggtgatggacgccttgttgatggcggtgtggcgacgcaaaccagcggcagaagtactaatccattcggatcagggttctcaatatacgagcgaaagatgtcagcactttatgacagctcacaatttaaaaagcagcatgagtcgtcgtgggaattgccatgataacgcggtggcagaaagttttttccagttgctgaaacgagaacgcataaagaaacggatctataaaaatagagaagaagcaaaggctgatatcttcgattatgtagagatgttttataatgctaaacgtcggcatagtgcctgtgaagatcaaccccctgcagtttatgaaagtgcctggttcatgaggcacgctaccgtctaggaaactggggtctattcaaaatcgctggaaaagctggaaactcaatatatctgccgggtattgcgtattgctgaggaattggtgaagcaattccggttttccagtgtattcaacgctgggttcgttacgctatcgcttaaatccagtacccgacgcttgttgaatcgtgagctaggtaaggtagaagcaaagcgagtactgaaacgctggaagcaccttctgaaacccctgaggcgagatctggctttactgctggatcattacgaaggtacagcattgaccaaccgttacggtaaatgtgttaccaatgcggtagggcagtcattcaatatcacctacaaagatgtggcagcgcgtaaacggaggaagtcagatgtgatgcgccggaagctgctttcgcatatgttacagggcctggaaagtcaggccgtatacgattacgttgccagccataagggcgtttgtgcgctggaacacgatgggtttgtttcttatgaagagatcactgactggtcccatccatatctgttgattgagaaaaagcattaaggggagccactcagtcaattacagcttatcccggttgatagactagacgggacatttagctctttcatgatgtgcatagcaggtgatcctagcctgctttcagcgaggaactgacatttaatttatattttttcaggtggttacattcagtaatccaccacatttcctcattatcagcgtctccgcagcaaaatcgcccacagttgcaccctacagaaattgacactattgttggccgagaggtactggctgtgggctggaaagcgataagagggcgatgaaccacaaaatattcccgttttgttactttgatacgattgctcaaaatgggtggcaacactgagatagttgaaatgactgcatgttacattgttacttttgttaccgttgaaaacatcaagttggagagctaaatggattggccaaaggagtacagcaagacgactcaagcggtaagagatgcggcgtataaacactactatgttgaagcaatcacacggtcggttctgctaccgggacaggagaaaaccgcttatcacgatggactactaacgacggattattaccttttcctgttcaccagcagggagaatccgaagcttacagggtattttacctgtggcttgtatgctgcaaaggggtggttcgagttgaacggacagcgacctgaggaaattccatcatacaacccccttacgggcgagtcctccggtggtagtaaaaagagtggctgcgggattactaaaccgctgaaagctgaatcagacccaagaatgaaacgtcttatcagggtactccagacgttcatttctctgacggacgatgagaaaaggaaaataaaaggcgagtcaaccacactggctgtcctacagaagctcataaaagcgtcaaaagaagcccccagcacgtcaaatattagatcagtaaataccactctgtacaaagcgctcaaggatggccgtcatggtggtgctcgtacattcactcaactagttggttattacgagattcttcttggtgtgactttcaagaagatatctattgatgatttcaatcaggagatcgacgatacccgtaacaagtcagcgacatatccgtatatccctttggcatcattctgaaatgaagtgctacagtcttgtctgctatcggcccatcgatcaagcttagtgggcggaagctctgttaggaacgaggggctggtcacggggtggcgattggaaaatgctgagtgatggatttcgcttccagctcaagcgttaagattgagctagctgaatatagttctttataacgacagcattagttcttaggaaatctaccattttatggcagtattcttaaacacactatgtcaaggaatacgtatgtcaagaatcaccgtcaaagctggagccgactttcttactggattggctcatgcaaaaccagttgccgcattgagtgagctaatttggaatggttttgatgcaaaatctaagcgtgttgagatcgagattaagacggatctggcctttggggggattgaagcaattctgattaaggattatggtaccggaattgctcacaataaagttgtggattactttggtaatctcggtgaatcttggaaaaaagctgagaaggcaaatggagatcgttccctccatggccagtttgggcgggggagattcaaatctctttctcttggtgaacaagttcattggaaaaccgtgttcgaaaaaaatggatcaaaatataaatacacgatttcaaccgatgctaataaaattaacgattttacaatcagtgagccagagttagctgatgatgaagatgtaggtacacaagtagagatttataatgctagtaacactgcggagcttttattaactgaagatgctttagctgatctaatcatggaatttgctcttttccttacagagtatccaagtaggaagttaatattcttaggtaagagtgtctcaccttttgatgcttggtctgacaaacaggactacgatataggcggggtgagtctcccagatggttcattgattaatgcttccttgactattatagaatggaaaaagaaagttcatagggaacttcattattgtgatttgttagggttttctctatacaaagagaaaattgggcagattattcgcgctcctgggtatgattttacactctacgcgaagtgtgattattttaagacgctaagtaataaaaatgaagtatctttaggtgagcttattcctgaggttagagcgattaaagatgctatcattcaacgggcgaagattcattttctcgacaaagcatttcttaataaatccaaaatcgtcgactcttggaaagaacaagaaatttacccatataacgatgacgtactccaaggtccgacggaagtaattgaacgaaaggtgtttgatattcttgcggttaatgttcaaagctatctcaaaagctttgaaagtgctgataggaaaacaaaaaaattcacctttatgctcttatctcaagcgattaaacagaatcccacgtctgttcaaaaaattctaaccgaagtgttaggtttgaagtctaaagagcaagatgaattggctgcgttattggagaggacaaccttatcatcaataattagtgcttctcagattgtgtctaatagagttgattttattaatgggctagataatcttttacatgataaaaatacaaagaaaacattattggaaagagatcagcttcataaaattatagaaaaggaagcttggctttttcgggaggactttttccttgctggttctgaagactggcttgaagatgttttaaaaaaacatatcaagcatcttggcaaaagatatgatgaggatgataacgaacctgttttactcccagatggaaggcaaggccgcgttgacctaatgtttgcaaagtgccgtcaaccgtatgaaggctatacagagtatttagtcgttgaacttaaacggccctctcagaaaattaattacgatgttatcggtcaggtcgaaaaatacgcgttatctgtttctggggatgaacgttttgatcatactaaatcaaaatggactttcatagcagtgtctaactcaatggatgagtatgctgaacgtagggctaatcaacgtgggtggcctaaaggtaaaacattagatgatgctgagttaaatgttgaagtatgggttatgatctgggctgaagtgttgaatgcagcaagagcaaaattaagtttctttagtaagcagttgaatctagaggcatcaagagatgatgcaacatgttatcttgaaaagacacaccgtgaatttattccggttataaatagtactgaagaagtctaattatcctcaccgccttcgggcggttttttgttgttattaaaatgatctacgcattctaataattataaagctacgacgacttcctgtaagtatccctgcaaaatgagtcatcaatttttagagagtttctggcacttcaacttccgcttctggctcgaagtcatgtggtctgccaagtgctagaagcggatgtacatggtcgtgaattagtaatctgcctagcagaaagattaatctgatccacctaacatggatggtgaagtggaccaaacagcaggatattatcataccggtattgcgttaattctgaccaagcatatgagtctattcaataattaaactttcaatgaggataccagagagccttttcttttagcatgatcttttcgcaacaaaacaagttcaagcattgcatagggttcaagagacttttctataatgctctcttcatcgataagttcatcaaaagaagaaggactatttaaggatctaaattcttttaagatggcttgatattgctctgataaaccataatgttgcgttagttctatgaataaatcccgataatatattggcctgttaatcggatatgaatctatgatttcggcgagagtacttaaaacaagaatgtgaaacgtctgaaaaggccatagttgctcatgttttcgattcattttcaggtgccgtgggaaagaggggcctttcttgtctaatgctggtgtaaaaagatgtctcttaatcatccattctttccaaaacgaatagttagccttgaagaatgtgtcgtaaccgtttgagtattcagaagctaacatttcgaccttttcttttatatggcgtagtttgtcgatgttaattaattctagtatatattggttccttcttttctgaatgcttgcctccacagaaggatgtttcaaccatgagcaatgaataacattagacgcatcgtcaaagtaattacatatcgcatatttcccagcgggggttcgcaattcaggaatgcaacttgagtatgaataaccaactctgatcgttctacctccagtaaatatatcgaggacgacacattcatcagactcaaatgtcagcgagactttttgacatgtaacggtgcgggcagtaaatacctctctatttatgttatgcgtcttaccattgtgttcgactactatgtcttggcatatgccggggagatacagcgttttatcctccatagaacgtttaatgagttcgtgtactttagattctctttcagctttggcctgttgcttttcttgttcaatcttttccaggtgcttgagtttatttttctcaagggctgagtggtagatccatttgtagtctacgcggttaacttttagtagagcgatccattcgtcaatgctcctgttttcattcggtggaaaacggtactcaatcgaatcaatctggtggtcgatgtaatattgtctcttctcttcctcacattcatgagtgacccagacttcaattgctacaccaccaatgcctgtctctaggtacacatctgcccagtatttcccgagtttgtactcaagggttgatttactgacatctgtagtaaattcaggaacaaatatatcagtatcatcaagagttaacgaattttggggaagggtaaacttggatatcgataagaagtgttgctgcatcccgatgtgcagctgtgtcatttgacagtctcggctttcttctttggttgtgtgagagaaatggtggcttattaccctaccgttgttctttgctaccagagcgtccccacagttcttacagatgcattcacaccgtttgccgttaggaacggcatcaacgtgaacaattttgtttgtatctttatggagggcatactcaaaaagcatttattcttttagcatcctttctcagatatatcgttgatttatcatcatttgttctattcttgattggaaggcatcttttccaacttatcggtttattcttgcatcattaccctgctttcatcaaggtaatgtaaagatctcgtataaccgagcgctggctgatgtgtaagtatcccgcttaaacggcccattcacttttagagatcttccgacatactgatgatgtcacctgaggagatccttatgcgcaagatccgatttaccgagcaccagatcatcgccgtactgaagtccgtcgaagcgggtaggaccgtcaaagatgtgtgccgcgaggctgctatttccgaagccagctattacaattggaaggcgaaatatggcgggatggaagccgctgatatcaaaaaaatcaaagatctagaagacgagaatcgccgtctgaagcagatgtttgccgacctgagtctggaatgccgtgcgctgaaagacgtcatcgaaaaaaagctttaaaaccagcgataaagcgtgagctcgtcaactatctgaccacgcagtttacgatgagcatacgccaggcatgcaggacgttatcgctgagcaggacggtgtttcgttatcaaccgaatacacgacgtgatgaaccggtgatccagaggctgactgagcggctgaacgctatccccgctatggatttaagaagctttttcaggtgcttcgcaggcagggatacgcctggaaccacaagcgcatacaccggatttactgtctgctaaaactgaattttcgtcgtaaagggaaacaacgcctgccggtgcgtaatccggcgccgctggccacgccggaagccctcaaccaaagctggtcgattgattttatgcacgacgcgctgacatgtggccgacgttttcggaccttcaacgtcgtggatgattttaaccgcgaggctctggctatcgaaattgacctgaatattccggcgcagcgcattgtgcgggtgctggacagaatagcggcaaaccgtggctatccgctgaagatgcggatggataacgggccggaattgatatcactgacgctggcacaatgggctgaagaccatggcgtgatgctggaatttatcaagcccggcaaaccaacacagaacgcgtttatcgaacggtttaaccgaacgtaccggaccgaaatactggatttttatctgttcagaacactgaatgaagcacgggaaataacggagcgctggctgaatgaatacaacagtgagcggcctcatgaatccctgaataatctgatgccggaagaaaatcggctgatggctgagaaaccggaaatctcaaaaagtgtgtggaactaaagctgggatacttacatcgcgagcttcggcaagtttgaccgtcgggtactcacccagcgcaaacatgctggatttaccgttgagtttaaaccgatagcgccatgcctttttgccattgggtttcacttcgaggtagagaccattgaaatgattgagccgatagagtttttctttcggcttggctgtgcggcattgtgtatcagtgagcatagcgagtctttgtctagttcttataccgcgattgtactcatccctataatcatttttcactgcattgtcatgaggttatgtgagacgccatgaaaagaaaaatccacgcaattgcgtggattttatgatgtttgtctgtcttcatgcgatacattgatatcccaagagacaacaaaattaacttagacgttaaacaagaagttcatgacatcgccatctttaacgatatagtccttaccttctgaacgcattttgccggcttctttcgcgccttgctcacctttgtaggtgatgaagtcttcaaaagcgatggtctgagcgcggataaagcctttctcgaaatcggtatggattttacctgcggcctgcggagccgttgcaccgacagggatggtccatgcacgaacttcttttacgcctgcggtgaagtaagtttgcaggttcagcagttcgtaaccggcacggataacgcggttcagacccggttcttcgatacctaactcggccatgaattcagcgcgatcttcgtcttccatctcggcaatatcagattcaacggccgcacatacggcaaccactacggaaccttcagccgcggcaattgcgcgcacttgatccagatacgggttattttcgaagccatcttcatcaacgttggcgatatacatcgttggtttcaatgtcaggaagcttaagtagcggattgctgctttgtcttcagcagtcagagtcttcaatgcacgcaacataccggcattttcgaggtgtggcagacatttttccaacgcttccagctcagctttagcgtctttatcgccgcctttggcttttttctgtacgcgatgaatggcacgctcacaggtgtccaaatcggacagcgccaattcggtattgatggtctcaatatcgtcagccggatcgactttacctgcaacgtggatgatgttgtcgttttcgaaacaacgtactacgtggccaatcgcctcagtttcgcgaatgttggtcaggaactggttgcccaggccttcgcctttggatgcgccctttaccagaccggcaatatcgacgaattccatcgtggttggcagaatacgctgcggtttaacgatttcagctaattggtccagacgcgggtccggcatgggtaccacacccgtgttaggttcaatggtacagaaggggaaattcgctgcttcgatacccgcttgtgtcaacgcgttgaacagggtggatttaccaacgtttggcagaccaacgataccgcatttgaatcccatgtttatatcaccttaaataacttaaaaatcagccaattaggtttaaccagccgatgtaatcaaaatttattccgccattatacacataatgatgatttatctcgatcctactgtttgacgcagtgattttaactgcggtttagcctctgtattttaccggtctatctttatctgggatcccgagagtcggtcataatttgttgttcttgcatataatcttggtttgttgaatttatcgctttcggtgagagtgagaagtaaacaagggaacgccgaataaaaatctacagcattaccggtttgctgccgataaccagtgattacacctgatgccaactatggcgtcttactgttctgatagggtattaaatatggtgatgagcggctttaaatggttgttgctgatcttatttggctctttgctgggcatcactatcacgcattatttaaccagagtggacactgagcgtcctttaacctggttagagcaaatcgataattacggaaaattagtcgagcgtcgctccgataaaagcattaaatatatcggagtgaaaaaggtgatgacttcgccagaaatggacagctatttaatgcgttttagcgcattaaccgatcgctatgaaactaacggtaataaagtcgctaatcagaaaaaatcggatgagtgggataagtttttctgtactgatggattaaagaatattatcggccagtataagaatcgtcgggtcaaagtgatggtgccaggtgcggtttacagcaagaccggagcccgtggcagcgcgacggcctgctatattaattagctaattatttgtttaacatgtttttgagtgagagttttcttagttttttgtgcagtacgatataattttcgcaacattgaatgatttcttcatatttttcttcatcgatcgtgttttctgctgaaatggctcttcggctggacattcggcatttataacacgcggattttaatttatcttttaactcattaaattcggcgctggttttatattccccccaaaaatcgagtgaaatacaggccagccgtatggctttattaaattcacccactttcttcgattgataatcaaagttctttatgctgcggttttcgcaaactctttttaacgctctgatacttctgactgtatcgtaagtcagtttcaaaaactgctcgactagcagagcagtttgctccgtttttttattatcaaaccattttatcgcgactacggccgcagtgattgccataatggcactggaaatcgcaatgacgatatctgaaattgaaccccattccatagtctcaatcctaataaattaaagtgtattggcgttttttataataattatccttgccctcggtgatgaatatgagggcaaggggaatattatgcgttggctttaaatgaatgcaggcgattcatagccttggtcacgtcttcttttaataaaacctcggtacaacgaatagcttcatcgatggcatcatcaattaacgtttgttcgctcgccggtggtttccctaagacaaatccggtcactttacttttatctcccgggtgaccaataccgatgcgcaagcggtaaaaattgggattattacctaatttgctttgaatatcttttaaaccgttatggcccccgttaccgccgcccagctttaatttagccacgccgggcggaatatccagttcatcgtgcgcaactaaaatttcttccggtaaaatacgatagaagctggccatggcagaaaccgctttgccgctgagattcataaaggtagagggaacaagcagtcgaacgtcctgaccggccagatttaaacgggcagtgtagccgtagaatttactctcttctttcagagattgattattacgctcagccagtaaatctacgtaccaggcaccggcgttatggcgggtttgggcatattcagcgcctggatttgccaggccaacgatcaatttaatgctgctcacttcgttattcgctattactcagagatgaaagaaccctagtttacccgtcgccgcgtagaatcacaaaaataagggggagaataaaggtaaaactagcggataaggtaaatactaaccatggttaattattcaacaattaggccaaataatcgcttaatgtaaagatttatagaaatatctttgccagatgtgatcgtctccgcaatacccttatgctttccctgactatactaagtcattaagtacaggtgaacaattcaataggaagagttgtttaaaggaagtgaatgcaggaggtggcatatgaaacgcaaaaccgcaacaacgttaggtaacgcgctgatggggctgggtctggtcactatggttgttggggtaggttactctatcctgaccgaagtttctcaacttggtttaccgcagttcttctcccacggtgcggtcatgagcatttttgtgggggccttgctctggctggtcggggcgagaatcggtggccgggaagaggtggcggatcgctattggtgggttaagcatttcgataaacgctgccgccgtaatgagcgacactcataatattgacgtatttatcgtcagtgaagtgtgatgccagaaaatgttaccgaaaatgcagctgaataattcaaactgagggtagggaattaaatgacagcccaagagtagaaagcccgttgttgcttgcgcttcaacgggtttttctttttctgcgtttaaccgcaaatcactgtcagtgcggcgataagtcagatacaacctatgccagacttgcagcgcctaagcgctgcagagagtgattaatgctcaaacatcgcagagatggactcttcgttgctgatacggcggatggcttcagccagcataccggacagcgtcagagtacgaacgtttttcaacgctttgatttccgcagacagcggaatggtgtcgcaaacaatcacttcatcaataactgaatttctgatgttttccactgcgttaccagagaagatcgggtgtgtcgcgtaagcaaatacgcgtttggcaccacgttcttttaaggcttcagcagctttacacaacgtgccaccggtatcgatcatatcgtcaaccagcacacagtcacggccagcaacgtcgccgatgatatgcatcacctgggaaacgttagcacgcggacggcgtttgtcgataatggccatatcggtgtcattcagcagtttagcaatagctcgtgcacgaacaacaccgccgatatctggtgaaacaacgattgggttttccagattctgctgcaacatatcttccagcaggattgggctaccaaatacgttatcaaccggcacatcaaagaagccttggatctgttcagcatgcaggtccactgtcaatacacggtcaaccccaacacttgagagaaaatcggcaacaactttggcagtgataggcacacgagcagaacgcacacggcgatcctgacgagcgtaaccgaagtaagggataacggcagtaatacgtcctgcggaggcgcgacgcagggcatcaaccatgacaaccaattccatcaggttatcgttcgtgggtgcgcaggtggactggatgatgaaaatatcaccaccgcgtacattttcgttgatttgcacgctcacttcgccgtcgctaaaacgacctacagcggcgtcaccaagactggtgtacaaacggttggcaatacgttgtgctagttccggggtggcgttaccagcaaaaagcttcatatcaggcacgagaagaacctcaggcttgcgtccagagaagatattgtcagccagtagtcaggggcgattcatcctactgattgcaatatacatacgggtatttaaaaccaaaacattgttaacctaaaagagcgttatgagccggcttttaattcagttaagaaggcaacgtgttggcgacgcaggataaaccgtaatgctatggaaaaacctgagttgccacgcaaatcgctgcttatttctcaacttttccagagcgtacaagatgcagtggtgagacgttaacgccacgagccacaaaaccctgtaaccactccggggcaatacttaacacctgacgggccgatgactcggtatcaaattcagcaaatacacaagcgccggtcccggttaggcgcgacggggcgtattgtaacagccatgaaagaacctgttcaacctcgcgaaaacgttttcttgcgatcggttcgcaatcatttgcgtaaggagcggctaaaagtgccgccaaggggcgaactggcgtgtttcttgttaaatccggatcggaaaaaataattggcgttgggatgctaacgccggggtgtgcgaccaaataccagcgctcaatgggctgcgcgggctgcaatttttcgccaattccttcggcgaaggcggcatggccgcgcacaaataccggtacgtcggcacccagttgcaggccaagatcggctaattcttcatcattcaatccgcattgccacaggtgatttaaggcgaccaataccgtcgccgcgttggaggaacctccgcctaaaccgcctcccattggcaggcatttttcgatcgaaatatccgctccgtggggggtatcggaacctgccgtatgttgctgcaataaacgtgctgcccgcacgatcagattttgttcgttttccaccccttcaagcggcgtaagtaaacaaatctggttatcatttctcggtgtgatagtgaggctgtcaccataatcgagaaactgaaatagcgtctgtaattcatggtaaccatcggcgcgttggccggtgatataaaggaataaattcagttttgccggagaaggccaggtgtgaatcatttgacagtccagttatccattttcagtttgatgcgttgctgatcctgctttagctccagacgactcggtaaaactggggtcaccttggtgttatattcttgataatcaacggtccacacttgatttccctgcttataagtcagctgtttcaggcgatatttatcgtcgaggacaaaatcgttggtttcgccgggcaggccgagaatccattggcgcaggctattgataggaatgtccatgccggtaagtttggcaatcatttcttccgggttatcactaacgtagcgtttgccctggttatccgtcagttgagtaacgcccggctgcacgaccagctccatctcggtgctgcccagcggattggtcagcagcagacggtaacgatccgctgaatattgttgccagaagaaacgggcataaaccttctgtttatctgaaatataagcgaaagagccgcgggtctggaactggctgagttgctgcaattgttgctcatgctgttgccactgcggcgaggtggggctcgtcgccgggccagtcgaggtggtggtagtacaggcggctagcatcaggctggctaatggaagcaggcgataaaaagtgaccttgcgcatgggcatatcaatatcaatcctttaaaagcgtggttttcaccagcgaggcatttgggtgctgcaaagttgcagccaaggtgctcacgctaacggtggtaaggcggagcgtcaatatcttgtttatgtcgtgagcaatttacccacgatatccgtgatattaggacggataatgcggtgtgactttaattgctctcgcgcatcaagtagaatgcgactcagacgagaatccatactaagacaagtattactctaagccgttctcatgaccctgctcgcattaggcattaatcacaaaaccgctcctgtctcgttacgtgaacgggtgacattttcacctgactcgatcgaccgggcgcttaatagcttgctccagcaaccgctggtgcagggcggtgtggtgttgtctacgtgcaaccgcaccgaattatacctcagtgtagaacagcaagaaaatctgcatgagcaattggttgactggctgtgtcattaccaccgcctcagccgcgatgaggtcataaaaagcctgtactggcatcatgataatgaggccgtcagccacttaatgcgggtagccagtggtctggattcgctggtgttaggcgagccgcagattctcgggcaggttaaaaaggcgtttgctgaatcccagcggggtcaatccctctctggtgaattggagcgtttgttccaaaaaactttctccgtagccaagcgggtgcgtactgaaaccgatatcggtgccagtgcggtgtcggtggcttttgccgcctgtacgttggcgcggcaaattttcgaatccctttccgaactgaatgtgttgctggtaggcgcaggtgaaaccatcgaattggtggcgcgtcatctgcgtgaacatcaggttaaacatatgattatcgctaaccgcacccgtgagcgggcgcagtctctggcggacgaagtgaacgccgaggtgattaccttgccggaaatcgatgcccgcctggccgacgccgatatcattatcagttcaacggccagcccgctaccgatcatcggtaaaggtatggtcgagcgtgcgctaaaagcgcgccgtaatcagccgatgctgtttgtcgatattgccgtgccgcgggacatcgagcccgaagtcggcaaactggctaacgcctatctgtacagtgtggatgatttacaggcaattattcagcacaatctggcgcagcgtaaggctgcggcggtgcaggctgaatcgatagtacagcaggaaagcatgaattttatggcttggctgcgttcacagggggcggtagaaaccattcgggattaccgttctcaggctgaacagattcgtagtgaaatgaccgccaaagcgctggcggccattgagcagggtgcgaatgtggagcaagtgatcaatgaactggcccacaagctgaccaaccgcctgattcatgctccaaccaaatccctccaacaagcagccagcgatggcgatatggagcggttacaattattacgcgacagccttgggctggatcagcattagtttcctcaattaacaggatttaaaaccgcggatgaagtcttctattgttgccaaactggaagcgttacaagagcgccacgaagaagtggaagcacaccttggcgatgccaatgtgattgccgatcaggagcgttttcgtgcgttatcgcgcgaatatgcccagttgaccgatgtgacccgttgctttaaagagtggcagggcgttcaggacgatctcgaagcggcagaaatgatgctggaagaccctgaaatgcgtgaaatggcgcaggaagaactgaaagaagccaaagcccgtagcgaagagctggaacagcagcttcaggtcttgttattgccgaaagatcccgacgatgagcgcggttgtttcctggaaatccgcgccggaaccggcggcgacgaagcggcgattttcgccggcgatatgttccgtatgtacagccgttacgctgaggctcgtcgttggaagatcgaagtaatgagcgccagcgatggcgagcacggtggctataaagaaattattgccaaagtatccggcgagggcgtttacggtcagctgaaatttgaatccggcggtcatcgcgtccagcgcgtgccagaaaccgaatctcaggggcgtatccatacgtcggcctgtaccgtagcggtgatgccggaaatacctgaagctgaaatgccagaaatcaacgcgggcgatctgcgcatcgatactttccgctcctcgggtgcaggtggccagcacgttaataccaccgattccgctattcgtattacccatattccgaccgggattgtggtggaatgtcaggatgagcgttcacagcataagaacaaagctaaagcgatgtcagtgctgggtgcgcgtattcgcgctgccgaagtgcaaaaacgtcagcaggccgaagcgtctgagcgtcgtaacctgttagggtctggcgatcgttccgaccgtaatcgcacctataacttcccgcaggggcgtgtcaccgatcaccgtatcaacttgacactgtaccgtctggatgaggtgatggaaggcaaactggatatgttaattcagccgattgtgcaggaatatcaggccgatcagctgtccgcactttccgagcaagattgatggattaccaacgctggctggcgcaggctgcggcacgctttcagcacagtgacagtcccaagcgcgatgcggaaattctgttgggtcttgtcaccgggcgtcagcgtacttttttgctggccttcggtgaaaccgaattgaccgaagagcagaaagaacaactggaactattagccgccaggcgagagcagggcgaacctatcgcctatctggtcggtgagcgcgagttttggtcgctgccgttgagcgtgtcttcggccacgttgattcctcgccctgacaccgagtgtctggtggaacaggcgctggtgcgtttacctgaacaaccttgtcgggttctggatttaggcaccggcagcggggcgatagcactggcgttggccagcgagcggccagattgtcaggtcaccggcgtcgatctcaaaccggatgcggtggcgttggcgcgccataacgcggaaaaactgagtctaaacaacgtagagtttctgcaaggcagctggttttcacccctcaccgggcgttttgcgttgatcgccagtaatcctccttatattgatgccaatgatcctcatctggagcagggggatgtgcgctatgaaccacacagcgcgctggtggctgaagatgaaggtctggccgatcttgcggccattatccggcaggcacccgattatctggaaccgaaagggtggttattgctggagcacggatggcaacaggcgacagcggtagagaaactgttgttgcaggccggttttagcacggtggcaacctgtaaagattacggtaacaacgatagggttactttggggcagtggttgccgcagatgacacataattagaatgaaaatggagtgactcatcatgtggattgattatatcgccatgaaatatctacatttggcgacggtggttatcagcattagtctgtttgttttgcggttcttctggaaatgccgcggttcagctatgatagacaaacgttgggtgaagataacgccacatatcaacgacacgttattgtttgtcagcggtattgcactgatatttatcaccgggttttacccgttcagcccgcagggtacctggcttacggaaaaactgttcggcgtgattctctacatcgtgttgggctatgttgctttaggtaaacgcgaccgtagccaaaagacgcgttgtgtggcctttatcctcgcactgggttgtctgtacctgattattaaactggcaacgactaaattacctctgctgatgggatatttatgagtaccattgctgatttcgaattcaacaccgcgcctttgagtgaaggggtgttactggttacccaggaaatccgaccgaactttccaatggctgacgttcgcaaccaactgcaacagttggttgatgatgcccgcgcggcgatgcccagtgacctcaatcaagatcagcaattggaagtgcttattgatttgttctaccgcaagtggaaattcggtggggcgagtggggtttaccggctgtccgatgcgatctggctggataaagttctggcgaaacgtcagggtacaccggtttcattgggcgtcatttttctgcatatcgcccatcaactggatttgccattgatgccagtgatttttcccactcagctcattcttcgtgccgattggctagacgaagaaatgtggctgattaatccgttaaacggggaaacgctgaacgagcatatgctggaagtctggattaaaggtaatttggggctgtctgcggaactggaagatgaagatctggaagaagcggaacataccctgattattcgtaagatgttggatacgctgaaagcggcgttaatggaagagaaacaaatggagctggcgctgcgtgccagcgaagcggtgctggcgttcgatcccgatgatccctacgagatccgcgatcggggtttgatttacgctcagctggactgcaatcatattgccatctctgatttaagctattttgtcgaacagtgcccggaagatcctatcgctgaaatgataaaaatgcagattcactccattgagcagcagcgtattactctgcattaacataatttgatagggcgctgaggcgtcgtgatttattccgatttaccatcattaaaggcataagcatgaaacaaaaagtggttagcattggcgatatcaaggtagcgaacgacctaccctttgtgctgtttggtggcatgaacgtgctggagtctcgcgatctggcgatgcgcatctgcgagcattacgtcaccgtgactcaaaaactcggtattccttacgtattcaaagcctcgtttgacaaagccaaccgttcttcgattcattcttaccgcgggccgggtctggaagaaggcatgaaaatcttccaggaactgaagcaacagttcggcgtgaaggtcatcaccgacgtgcatgaaatcagtcagtgccagcctgtcgctgaagtggtagacgtgattcagttacctgcgttcctggcgcgccagaccgatctggtggaagccatggcgaaaaccggtgccgtgatcaacgtgaaaaaaccgcagtttgtcagcccaggtcagatggggaacattgtcgacaaattcaaagaagccggtaatgatcaggttatcctgtgcgatcgcggcagtaacttcggttatgacaatctggttgttgatatgttaggtatcaatgtgatggtgaactctaccggcggtcatccggttatcttcgacgtcactcactccctgcagtgtcgcgatccgtttggcgccgcgtccggcggtcgtcgtgcgcaggtcgccgaactagcgcgtgccggtatggctgtgggtctggctggcctgtttatcgaagctcatccagagcctgacagcgcgaaatgtgacggtccttccgcactgccgttggataaactggagccgttcctggtgcagatgaaagccatcgacgatctggtgaaaagcttcccagagctggataccagcaaataagctgagttatttcgcgcactaaagcgatacaaaagggcagcgtggtggataactatgctgccctttctgttgtgaccaattcggttttaacgttgtttcagcgctgcgagcgcctcgggtagagagccgtagaagctcagcttgcctggaatcggcttcactctagcccgcgccagcgttttcaatggctggaacggcgtatcggtaattatcagctcccggccttctggtagggcttccacaaagcgcaggaaggcgttcaaaccgccagcatccagcaccggaactgcgtcccactgtaagacaatggttcgtcgattctcgctcatttctagcaactcattgaaaatacgctcagcagcggcgaaaaacagcgggccgttgactcgtaaaatcagcgtttgattatcctgagcgccggacaacgggctgaggcgagtcatacgggcaatgcggcgcataaacagcagggaagccagcacgataccaacggtgatagcgataaccatatcgaatagcaccgtcaggctcatacacagcagcatgacgataatgtcgtcttttggcgcccgccgcagtaaatctaccactttgtgcgcttcgctcatgttccacgccacgatcagcagcagggaggccattgccgccagcggtagataagacagcattggcgccaatatcaataacgccagcagcaccagcagggcgtgtaccaccgcagaaatcggggaagtcgctcccgcgcgcacgttggcggctgagcgagcgatggccgctgttgccgtgattccgccgaagaatggcgcaatcatatttcccaggccttggcccaccagctcgctgtttggacggtgtttctggccggtcatcccgtccagcacgacagcgcatagcagcgactcaatggcaccgagcatcgccatggtgaaggcggcgggtagcagagcggataccgtggcccagctcagagtaaactcttgcccatgagcggccggcaggttccacggcagtacgaactgcggcagaatcggtgggattccttgtccgtaggtaccatcggccagcatatagctgaactttgaaccaatggttgccacttgctggtcgaacagagacaaaacccacatgacagcggtgcctgccactagcgcaggtaagtgacccggtaacttaatcccaagcctcggccagaaaatcaagaccagcagcgtcacgctgccgattaaggtatcgctgaaattaaggctcggaagcgcctgcaccagcgctgaaactttactcatataattttccggcacgacctccatctgtagaccaaaaaagtcttttacctgcatggtggcaatggtgatggcaatcccggaagtaaatccgagcgttaccgatagcggaatatattcaatcaatcgtcccagccgtgctaatcccatgcagagtaaaaacagaccagacatcagcgtggctagcaataatcccgcgaggccgaactgctgtgagaccgggaataagatcaccacaaaagcggcggtagggccggagacgctgtaacgcgaaccgccgctgactgcaatgacaataccggcaatagcggaggtatacaggccatattgcggaggtacgccgctggcaatagccaaggccatcgctaaaggaatggcaataatcccgacggtgatgccggcaattatgtctttaataaatcgttgaagtgtataggtttctcgccagcaagcttcaataagcgcgctgaacggcctaatgccgttaattccgtgcgttttcatctaaggtgcaaaccaaataaggaaaagacaaaataaatggcgggccaataggggtccgtctcgagtagtgaatatcaacgatacgccaaatgtggggcagagatctagatgtatatcaatctctgatcggaataaggataacagggggttttaaaatgtccttataagcgtaaaaagcacgtcagataacggattaaagcatcgatatttattcattttatgaacttttatcagttatagatgaatatttattactaatgagtaaaagagaataataatgattactttgcactcaatatttggggggcgtgggtggcgtaaaaaacgctgggtaatgtggcaggaaagtgtaagagagcagcaataatgaaaatttccctgtggaattgctttacgtagctaagatttaaatgagaagcccttgaggtaatctatattatgctggcatgattaggttataacgagggcagaaagcaatattatttgaagacgacgggtcgcgctgatggctataggtaaagtgaacataatgatgacaatacagcataagtttcattttccgtgagtttcaccacaactctctcatcgctgtttaacgatgctagtgtcacttacgcatcgctatctatcagctatttcgctttgagtaaaaatacgccgttttcctatgacggtgaaagatggaaacgtttgctgtttggtctggtttccggcctgatatcgctgtatttgaatcaggacaaattcattatcatcaacagcttcttttatagttttgaaatattaccgatcattttggcgacattttacggcggctggctcagtggtttagtggctttagccattaacattatttttaccggtctgtttacgctggataatatactgattgtcttaatcatatttccgctgctgttatccaaagtgtgggaaagaaagagcaatcgggttttctatctcactatcgcagttattgccgtttaccgtatctgcgtcggcgcgacttttctcaactatggacatttgtggccgtctacattgatttatctggcgtcatctgctttgtgtctggctatttgttttcacgcattgaattttaaagaacgccatattcatgcttattttgctatgaaagagcgagcgaacgtcgataatcttacccgcttaaataaccgcgctagcgttgatttccacttaaagcaattaagtacgttaaggcgcgcctgtgggttattaatactggatctggataaatttaaatcggttaacgataattacggtcacggcgcgggagatttgattctttccagtgtgggtgagattttgaagcaatccgtgagaagtctggattttattggccgcttcgggggcgaggaatttatcattattaccgaaagccaccatccggaaaatatgaaagtgatggcggagcgcattcgagaaaatattcaacagctagaagtgacgttaagcgatggacgcaaagtcaggatcactatttctattggcgtttcgctgtatttaccgggaatgtcgatggtgaaggcgataaaaatggcggacgatgcgctgtatcaggctaaacggcagggacgaaatcaggtggtttatagcaaactgatgccattctctccgttgggagatcgcatcaggggcgttggaaagcgacagccgcggcgtaatagcccgttatagccgatgagtactatcaggtactttttggggatggcacaaaagttaaaggccccgactttcgtcggagcctttagctcgaatatggcggtgagagaggggttcgaaccctcgatacacttacgcgtatacacactttccaggcgtgctccttcagccactcagacacctcaccgtgttgttacagcgttaacactgcaacggggcggtactatagggataggggccttgagggtcaagaagaatttacgtgaaaccattcgcttgcttaattcaccgtcaacttgcggaaataccccgcaaatccgcgttatttttgccagagttccgcttgctgtggcgaatctaccatcacaaaatcggcctgaagcgctttcgctaaattataatcagattgcgaattaatacctattaacatcaatttgctcaatgaattgcgtttaaaacaatgagtcactttttgattccacaccatagtcgctgctgattgccctctacccagcgttaaggtttcaaccacagataccggcgcacgtaattcaaaagcatgatattccagtttctgcgcttccattctgtcgtcaacccgacaatcatcagccattagtacattagccagcgttttacgcgtatggctgcgcggtgcaaatgttctgatctctggccccagctctttgaaaaaccgatgcttggttgaataaactcgggttctgcccgccgcgttgctgtccgtaatgaccgccgagatatattgagccacgcgaccaaagtcttttgtatgatcttttatgtcgataaagaattttgtcgtaggaaatttgtttaatacgctggccagcgtggggatttttattcccaaccctctgaatttgtattctccttcagatttaaatttataacccgcatccagcttttggagctcttcaagggttaattcagccacggtaccttctccatcagttgtggcattcagatttttcgaacggaaaagtacgggaatgttatcgctagtgagttggacgctaatccagataatatccgcatgatgttccagtgcgtgttgaatcgctgttacggtgttttccggcaaatccgctgtaccgccgcgatgagcgacgattaacggtgccgcctgagcggggagcaggctgggcaacagtgtgagggaagagagataaaataacgtgcgtaatttcatgagaatacccctgtccatagagatgttgaaacgcatagcattttgtcgccaagcgatgttttggctcagatgttttagcatggcggaattaggggttggcataatcaaatttaacaggttctatctatttcttattcaacagaacggtagcgaaaagtgattaatcagggaaaagcacagggaatggggaagcgtcaggtttggctggttttagataaaaaaaacggcaatcacattcagtgggaaatcgctttccctactgtggattgccgttcttcttgcggaggactaactgcatcatccggtactcaatatggcggtgagggaggggttcgaaccctcgatacgcttgcgcgtatacacactttccaggcgtgctccttcagccactcagacacctcaccgtattgttgtcgccaacgccaaacgttgtcgaccggcgtaatgtagggaaaaccaagctcagcgtcaaccctcttgtgtattgtttatgactgtttagctaaagttgcatcaatttgctgatttcatcggcatttatttccacaaaaccgtcgcgtcgttgtaaatctctcgcagaaaatatttttgtcagacaaatagatgattatttgtacttttgtgcataattaggcgattaattcgcacaattagtgcttaattatgaggttaacgggctttgttactggagttatagtcaaaaatgtcgctaaataatcggcttgatgggattgaaataccgaacgaaagtacctctgcctgcgcggctatctgagcaaaactacggccagtcgtacttttggtcggaatagtatttttagtcggaagagcacttttagtcgagatagtatctttagtcgaaatagcatctttagtcgaaatagtatctttagtcggattagtattaggggtaaattttggaacagtcagattccgcaccgcagctcagtgatgatctaccgcagccgattccagccggaaccgggactttattcttcatccaaacctttgccacgttaggttttgccgtgctttattccacgctggtgctctatgccaccaagcgtttggggttcagtgagagcaacgccaatgccatcatgggcgtattcggcgcatttaactatgggctgcatttattcggtggttatttgggtgggcgctacctgagcaatcgaaatctatttgtgctgggcatggtactacaggttattggttgctggctgatcgcggtttatggcctgtggggactgtattgggggctggcgatgttcctgaccggcagcggcctgaatgtaacctgcctgaatatgatgctgactcagagatttatgccggatgacgatcgccgcgaatcggctttcctgtggaattacgccggcatgaatttgggtttcttcctcggttttgccgttgccggttatttccaactgagtgaaaactatcgagcactgttcctgtttgccactttgggtaacctactggcgattgtgattactttatctcgctggcacatattgagagacaccaatacgccgctacagcaggccggagcaaagcaggccaaatggcgaatgctggtgggtattttggtgctgattgctttggttcccatcattcgtttgttgctgactcacgccggttttagcagctattttgttatcgccatcggcgtcgctgtttttgtgatgctaggcgtagtcacggctcgccatcatcctcacgtcgagcgccgtcgtatggtggcctacatgttgctggccgcaggctcattggtcttttgggcgttgtaccagttggctccgatggggctgatgttgtttgctgaacataatatcgatttgaacgtttacggctggcgcgtggctccgcaatggattcagaacatcaatacattggtgattgtgatcggtgggccactgatggcgctgtggtttagtcgcttgcgtaaacgcggtttctctattgatgttcctcttcaattttctggtgcgcttttgtgcatggggatgggcatgctggttctgccgctgggaattcaactggcgggaggcgacgggctggtggcgtttaaatggattgcgctgagttatgtactgcaaagtacgggggaattgctgatttcaccgatcggatacgccatgatcggcaaactggctccgccgcgctatcagggcgtaatgatgggatgctggatgatggtgaccggcgtggcatcagttttggcgggctatgtctctggcatgatgccgactaatagcggcagcacgccgatagaaaccaatccgggctacagccatattttcaacatgctgggctggggttctttgctgaccggcgcggtgctaattgtgctgattccgttgttgcgtcgtctgattcaggaagggcaattatctgcgcaaagcaagctgacagcgcaaaaccgttaacccactggcattattcagatttagggcgaaatttctccggtttcgcccttgcatctcaccgctaatcgcggaaatctagggtgacttatgctaggagcctacagatcatgaatattattttttatcacccctttttcgatgcccaactgtggctaacgggcatgaagactcgtttaccgcaggcaaatattcgtcaatggcagcggggtgataaccaaccggcggattatgccctggtatggaatccgcctcacgaaatgctggctaagcgccaacaactgaaaggcctgtttgcgttgggcgcaggcgtggatgccattttggatcacgagcgccgtcaccccgggactttgcctgccggagtgccgttggtgcgactggaagataccggcatggcgttgcagatgcaggaatatgcggtgagtagcgtgctgcgttatttccgccggatggatgagtatcagttgcagcaggagcaaaaactgtggctgcctctgccgcctcatcagcatgataatttcgttgtggggatcatgggggcgggcgtgttgggcaaaagcgtggcacaaaagctggcgggttttggctttaacgtgcgttgctggagccgaacgccaaaacacattgacggcattgaaagctatgccggtggtgcgcaactgggcgattttctcaaagggacgcaattgttgatcaacttgttgccgaatacgccggaaactgtgggcattctcaatggttcgctgttctcccaattgaataagcgggcttatgtgatcaatctggctcgcggcgtgcatttgctggagcgggatctgctggcggcgatgagtgaagggcaagttgcggccgctacgctggacgtttttgccgaagaacctctaccgagtatgcatccattctggacgcatccacgagtgaccattacgccgcatattgccgccattactttacctgaagtggcgatggatcaggtggccgagaatatcaagctgattgaagcgggcaagcaaccgcagggtctggtggatgtggcgcgtggttactgattccagcaggcaaaacatgggtttcagctcggctgcgcgggggattcctgctatgcttagcggactatgttttgcctgacaaactgagaataagaacccgcggagtagttatgtatccagttgatttgcatatgcacacagtcgccagcacccacgcttacagtaccctgcatgattacatcgccgaagcgaaacaaaagaatattcagctgtttgcgattaccgatcacggcccagatatggctgatgctccccactattggcactttatgaatatgaaagtgtggccacgcttggttgatggtgtgggtattctacgcggtattgaagcgaatattaaaaatctggacggggatattgattgcaccggcccgatgctggacgcggtggatctggtgatcgccggtttccatgaaccggtctttccgccgcaggacaaagccgctcatacccaggcaatgattgctgcgatggcgcagggcgatgtgcacattatcagccacccgggaaatccgaagtttccggtcgatattcccgccgttgcggcggcggcagcaaaatatcaggtggcgctggagttgaacaattcatcctttactcattcccgtaaaggcagtgaagccaactgccgcgctattgccgaagcggtgcggaatgcggggggctggctggcgctggggtctgattctcacgtggcattttcgctggggatttttgatcactgcgaacgcataattgctgatgtggggttcccagaagatcgcattttgaacgtaagcccgcgccgtttactgaatttcctcgaactgcgaggccgcccggccattgcggaattagccgatatgtgacatcgtcacgcccaatgttagcgcagaaaaatagttaccgtagtaaatggtcagcgtagtaaaagcgtttgctgcgaaaaacatttaccgccgtagacccatagacaaatggattaggacagttttatgaatgatttttcgctggtttgccgggttttgggttcgctgttttatcgtcaaccacaagatccgctgttagcgccgctgtttactctgattgaacaggggaagctggagcaacattggccgctggagcaaagcgatctgctggcgcgtttgcagcaggaatatcagccgcaggcgctggccgatgattatgccgcgttatttaccggcagtgaatgcagcgtttcgccttttgcttctcaatgggaagacgcgcgtccggaagcagagttacgcgctttcttgcaacaacgcggtatgccgttaaacgacgggccggtagatcactttggctctctgctactggccgcctcctggctggaagatcaggcgcaggaagacgaagttcaggcgcagattgctctgtttgatgatttcctgttcccgtggtgcgggcgtttcctcggtaaagtggaagcccatgcggcgaccggtttttaccgcacgctagcgcagttaactcgcgaagcgcttcaggcgatgcgcgatgagctggcggaagaagaagacgagcccgaggcagaataaaccgtaggtttgcctagcctggacgatcaaaaagcccgccgatcggcgggctggtatgattgttcagtaaacgcaggttttagtcagtaaagggtacgattaacatccccggtttaacttccagtcctttagccagttttttcgccatagcttcggttttacttttgtcagcatctaatacataggccggttgttggtcaaaatacgattttagtgactgattcaaatagggttttaacatactcatcgccgaatccattttttctggttggactttataatcggtcacttccatatctttcaggaaaatagcccctttctcgcgatcgaataccggctgcgctttcagcgtcagctgcatatcggcgttctgcgggccgaggatcgaactgattttcacctgcgcattgccggttagcgtcactttacccggctcggcgcgccctatctggctctgtaattggctcagggtaatatgggcatccaccagccccggcacgccaatctgtttctcgtaatgattgtgtttttgcagatactcgttaatttcttgctcggttagcgtgtactgtgtcagtgggttgcagccggcaatggcaccgacaaaaatcagagcggcagcgccccaaagtagctttctcattatgacctcgttgaaccgcaaatttggctaatagtaaccggttagaccttgggttggaatttgtaaccggtttctgccgttgcaacgccattggtggcgttcagaaataaggctggatagtgcgggagcggggagaaactgccaatcggataactctgtgtccgatgatttaattaaccagacccggttttaggcgcgtttattcctgattctcgaaagtgtccatcagcaaaaaagtgcctgcctgtcgttggtaactgtctatttgcggaaccagacgcctgaaatgctcggttttgcagtgggtatccagcgcgacgcgatccggccattgctcgataaaaatgaaatggccgggatctttttggttgatacacaactcataagcgtgacaaagcggctcctgcaaggtttttcctactcattcccggtatagcggcatgactttatcgatatgttcaggatgaacaaaatcttgcgcaatcactttcaacataggaataactcactgtttaagcctggctatccatttgattcggtcacttgtggcaagattagctgccacttaacattgccggttcgatacgccgttgattaaactgccaatataatccagccagcgtaatcaggccgatgattccgagtaggaaccaagggagctgcggcaaagacaggcttttgcctgtgtcgtacatccagccgccaccggtgtagcctagtgcgccacccaatgccaaacctaaacggctaaagcccatatagctacctctggcacgcgcatctgccagcgaggcgctcagggtttcccgcgctggctcggcaataatggaacccaaatagaagaagcagatcagcattaataatgtttgcaaactgtcggttaacccgatagggaacatgctgatgctcataataaacaggccggtcatcagccgttgttccagacgaaaatgcttttcgctccagcgggcgatcggatacagcaacgtcaatgacagcgcggcttcaatggcatacatccattttaccgccgccggagaaccggccacttcgtttacaacgataggcagcatcaacatcacctggaccgccagcatgtaataaccggtgagcgtcaggacataggtcaggaagcgtttgtcgcgaatcactcgcagcatgccttcccgcattggggtgcgcaccgttgaaatacggtaggcggggagcagccaggcgttccacagcgcggccagcacaaaaataaatgcaccaacccaacacaccagatgaaaatcatactggagcagccaactgcccagcagagcgccgatcactgcaccggcgctatcttgcatcatgagaatagagtaaaaacggccacgttcatgagggcgaaccagtttgatcaccaacgcggtgcgcggcggatcgaacaatgtgccgcccagcgcggacaatgcgcaggcgagccacagaatccacggctgatccgcgatggccatcagggcaaaacccgccgcgcgcagcaacatcccaatcacgatcattggttttgcgccaaaacgatcggcaatggcgccgccgaaaatgccaaggccttgttgaataaactgtctcaatcccagtgcggcaccgacaacaaccgccgcccagcctaattgatcgacaaatcggatggatatcaggggaaacaccacgaaaaaccccagcacgactaataagttatcaaacaataagaagtacttacccaagctgcgcgcttgcgataccagagacatgtttcaccgtcagaaaatagaaagagaggaagggtaattattaccctgatagtttgtacccaaattgatggaagcgatagatggtgagttgataatatttttttatcgtcaatatgttagctagcgggcaaattggtaaaaaaaatcgtttttgcgaattgattgcgcaataactcgtcaatagcggttttacccgcgaccattgcaacggttatattaatcgtcacttttaatgttccgcctgaactaaggggagtcgatgtttggctatcattcagtatcaccaaaagtacgcctgacaaccgatcgtatgtcgctgcgtttggttcatgagcgggatgcgtaccggatggcggagtactacgccgagaatcaggcattccttaaaccttgggagcctgtgcgggatcaaagccactgcgtgccttccggttggcaagcgcggctcagcatgattgccgagatgcataaacagggcagcgcctattattttattctgctcgatccggaagagaatgaggtgcgcggcgtcgccaatttcagcaatgtgatgcgcggttcattccacgcctgtttcctcggctattctcttggcgaacgctggcagggacagggcttaatgtttgaagcgctgcaaccgctgattcgctatatgcagcgacaggaaaaaatgcaccgaatcatggctaactatatgccgcataatcgccgcagtggcgatctgttggccagattgggctttgaacgtgaaggttatgcgaaagattatttgctcatcgatggtcagtggcgcgatcacgtgctgacggcattgaccgatactgaatggaaagcaacgcgctgaggttaggatgaaatacagtttaagcccgttagaagcccgtgtagtgggctgtttgctggaaaaacaggtgacaacaccggagcaatatccaatgtctctaaacggtatcgccaccgcctgtaaccagaaaaccaaccgtgagccggtgatggaactgtccgagagcgaagtgcagcaaacgctcgatctgctaacgaaaaaacacgttattcgtagccaaagtctggtgaatagccgggtaatgaaatatgaacaccgattttgcaactcggagttcggtcatctgaagttttcttccgcggaagtcgcgatagtcaccacattattgctacgcggcgcgcaaacgccgggagagttgcgtacccgcaccaatcgtatgcatgaattcagcgacgtgagtgaggtagaggcaacgctggaaagtcttgctacacgtgaagacgggccttttgtggtgcgtttgccgcgcgaaccaggcaagcgagaaagccgctatatgcatctgtttagcggtgaggttgccgccgcctctgcggacgagctggcaagcgagccggtcaacggcgtgctggaaacccgaattgctcaacttgaatatcaggtagctgaattgactcgccgtttggatgaagtcatgacccagttggatgactaataaggtcactatgaaaaaacttcgcgtgggtatggtggggcttggcggtattgcgcaaaaagcctatttaccgattttaagccgtgccgacgactggacgctggcaggcgctttttcgcccagtcaggccaaggctcagccgctgtgtgaccgctacagaataccgtattttccccggttgaatgagctcgcgacggcctgcgacgcgatttttgttcacagcagcaccgccagccattttcaggtgatcggcgaactgctgcgcgctggcgttcacgtctacgtggataaaccactcgctgaaaccgtggaacaatcggaacagttaattgaactagcggaaaaacagggcaaggcgctgatggttggcttcaatcgccgttttgcgccgctgtatcagcaacttaagctggaaatgaatcagccggcttccctgcgcatggaaaaacaccgacaggatagcgttggcccaaacgggctagggtttaccctgctggatgattatctgcacgtgctggataccgtcctgtggctgggaggcgaaaacgccagcctattgggagggcatatcgccactaatgacgcgggtcagatgctgtatgccgaacatcattttcaggctggaaactgcctgattaccagcagtatgcatcgtcgggcgggaacccagcgggaaagtgttcaggcattgacggaagggcattgctaccagatcaccgatatgcggcgctggcagcaggagtctgccggacagatgattgaaactccggcaccgggctggcaaacaacgttagaacagcgcggcttcgtcggcgcggtacgtcattttatcgattccgtcagccatcaaaccccgccgttgatttccggtgaacaggctattagcgctcagcgaagggtggaaaaaatgctggaaaagcgttgagaagcccgcaaggtggcgagatgcagattgttacaacaagaagtggctattagtcggcggatacgtagactattgtcatactaaaaacccgtcatcgggttgagctgacgcctgctaattgcaggcgttgatatttccagcgtaacgaatcagaaaatatatgaatttacttaaatcactggctgcggtcagttcgatgaccatgttctcgcgcgtgttgggctttgcccgggatgccattgtcgcgcgaatttttggtgccggtatggctaccgatgcattttttgtcgcattcaaattacctaatctgttgcgacgcatttttgctgaaggggcgttctcgcaggctttcgtgccgattctggcagaatacaaaagtcagcagggggaagaggcgacccgcacctttgtggcttatgtttccggcctgttaacgctggtattggcagtggtcacggtattggggatgctggcagcgccttgggtgatttacattactgcccctggttttaccgatacgccggataaatttgctctgacttctgcactgttgcgcattactttcccgtatatcctattgatctcactggcctcgctggtgggggcgatactgaatacctggaaccgtttctccattccggcctttgcaccgacgttattgaacgtcagcatgatcggtttcgctttatttgccgcaccgtatttccatccgccgattttagctttggcctgggctgtcgttttgggtggcgtactccaattgggctatcagctgccgcatttgaagaaaatcggtatgctggtgttgcctcgtctggcgctgcgcgacgctggcgtgtggcgggtgatgcgccagatgggacctgcaattttaggggtttccgttagccagatatccctgatcatcaataccatttttgcttcttttctggtgtctggttcggtttcatggatgtattacgccgatcgcctgatggagtttccttccggcgtgttgggtgtggcgttaggcactattttgttgccatcgctggcgaaaagtttctccagcggcaaccacgatgagtattctcgcctgatggattgggggctgcgcctgtgcttcctgctggctattcccagcgcggtcgccttgggtattttggccaagccgctggtggtttccctgttccagtacggtaaattcaacgcttttgatgcggtaatgacccaacgtgcgctggtggcctattcggttggtttaattgggctaattgtggtgaaggtattggcgcccggcttttattctcgtcaaaacattaaaacgccggtgaaaattgccatcgccacgttgatcatgactcaggtgatgaacctgatgtttatcgggccgctgaagcacgctggtttgtctctgtctattggtttgggcgcctgtctgaacgccagcctgctgtactggcagttgcgtaaacagaaaatcttccagcctcagccgggttgggggatatttatgaccaaactgattgtaggcgtggttgcaatgtccgccgtactgattggtatgctgtggttaatgccagcctgggacgtcggcggaatggcctaccgtctgttacgtctgtttgcggtcgtggtggctggcgtggtggcctactttggcgttctggcgctactcggtttcaaactgcgcgactttgcccgccgggttgcctgataactaaatgggcaaaaatgctcatatcatctctatgtaaagcccgattcttctcggggttacgtgaaatagtcacctccaccctgttagcggtacgctgacagggtgtttttttatatcaaatgagatcaatatctcagttttatttcctgcactacaagttcccgccaaaattcttttatattaattatccccattatttcttagaactatgctagcgaggttggtaattaaagctaatatttttcttattcatgccgataagtgtattaagtcggggtttttgaaagatttgatattttataagaatcttctaaatgatgattttcattaggaatgctgtacacattaatttgacttagtgttgaaggataattgatttatttactggtttaataacattctgattgcgtttaagtctgactagacaacagcgatataaccgtttgcgccctgctgaattcagggttcagtcaatttagaatgaaatatatttacatatatttaactcaaggatgagtagggcaggttatttactaaatagcttgggctatttctcataatggaatctatgataaaaagaatcggactctattttctgctcgtcagtagccccgtccaggcggcgactcagcccgctatggggaattttttaccgctaggtgaaagcgaagcgcgccgctctttgcagaacagcgcccgtgaggttaatgagctaatggaacagcgtcgctaccaacagttgcgccaacctaaggcgattgaagaggacgttattcctgctcaggcggcgttgccggaatccgatcgttgtctggcgataaagggcgtttatttacagggaataacccttttaggaatgggtgaactgaataaactgaccgctttaccttcggattgcattaccagcaatgatatcaatcgcctgactcatgaattaacccgtctctatgttaggcagggttatatcaccgctcgcgtgaattttgttccgctgaatgctgacggcgaattgggcatcaatgttattgagggcgtggtagagaaaatagaagggggcgattattgggtgaatagccgattattattccctgatgttgtaggtaagccgctcaaattgtcgcagcttgatcaaggtttagaccaggccaatcgattgcaatccaatcagacgaaattagatattttgccagggaggagcaccggcggttctattattcgtctaaacaatacgcataaaaagccctggttgctcacaggcacgttggataactatggtcagaaaaataccggagagtggttggtccgtactaccgctagcgtagatagcccatttggtttatctgactttgtcagcatgaatatcagcagcacgatcaaagatgaatcgcggcatcataaccgggcttataccttactttattctttgccctacggagcttggacattcagcagttttgccagttattccgaatacctgaattaccagcgcttaccgcttaataccgtgaaactggatggcaatacccagcagtacggcgggcgcgcagattatatgttttatcgcgaccaggagcagatcgatgccctgaacgttcagctgacctataagaacgtgaataactaccttgagtcttcccgtttaggtatcagcagtaccaccctgacggtattggagttgggtgccaatcatttgcaaattcttccgcgcggcgtgctcagcctaaatgccagcgtagaacggggactcagttggtttggcgcggataaagccagttcgcatcggtcggctaactaccctgatgcccaattcaccaaagcgaaaatgtttgccactctcagccagcgttttagcctgtgggagcagccttaccaactcactcacctgttttacggccagtacagtcgcgatcccttgccgggggtcgaatggctaagcctgaccgatcgcagcgcggtgcgcggttttagccgcaataccctttcggcggataacggctggtatctgcaaaatacattatcacggccgatgacgctcggtaatgccagcttgacgccgcgcataggcgttgacgtagggcgtgttcaagcccatcgcgatgccgttggctggcagagcaatatggggctgagtgccggtgtgtccttcaaatattcgcaggcggtggttgatctggatgtgagccgaggatggctgctttccgatcaaaaaagtcccaccgacccgattcaggtgttagctcgcctgagctacagcttttagctgactttccattcgtcagtattgcagtgcttttacctttcaatgaatggaaatatttggagaaacatggatgaaaaaaagtaagttccgcctttccccctcaggaaagcttgccgcgtcgctggcgattatcattacttcgctaaccgcaactcaggcagcagatattatcggtgcgggcgatgccgggcataatccgggcatcagtcaggcggcaaacggtgcggcggtggtgaatatcgtcaccccgaacgcctcgggcctgtctcataaccaatatcaggatttcaacgttaacaaaccgggggcggtgctgaataacgccttgaacgacggacaatctcagttagccggtcagctgaacgctaaccccaacctgaacggacaggccgctaacgtcattttgaacgaggtcattagccgcaacccatcgttattgctgggtaagcaggaaatattcggtatggcggcagattatgtgctggctaacccgaacggtattgcctgtgatggttgcgggttcatcaacaccaatcgctccgctttagtggtgggaaacccgctgcttgaaaaaggagccttaaccggtttcaacactttcggcaatgacaatactttgagcattcgctccggcggattacaggccaacagcgtgttggatctgatcgcgcccaaaattgacagtcgcgggaaagtgattgccacgcagcaaattaacgcgctcagtgggcacaatcaaactgcagccgacggcagtttagtgcgagcggaggatgtcccgaacagtagtctggacagctactatctcggcagtatgcaggcgggtcgcattcgcttggtgaatactactgtgggcagtggcgtaaatctggccggggaattcaccgggttggaaggcatagacgtaagctctcagggcaatttgggcttacaggcagcgaatctgcgcggtggtgatatcggtctacagggtaaaaacatcgatgctcaaggcgtcgtgaaaaacagcagtacgaatcgcgacggcagtgagaattacaacagcacctggagcggccagtacgtcaatgaccgcagtaccacgcaacgattacagcgtacggtattaaccggcaaaaatatcacgctgaacgccagcgatcgtaaccgactgacggcgacagatattcaaggggataatgtcaccctgcaaggtggtgaactgacgttggacgggcagatgctgacccagactcagggtcatacgcacaatcaggataagcttacctggcggcacaatgtcacgacagaaagcgaacagcgtcagcagatcgggacgtcggtcaaagcccgtgagaacgcgactctgaaggccacggctggtgatattcagttgaaaggcagtagcgtggaagcgggtaacaatctggcactcaacgctaccggcgacattcagctgacggggttggtggagcagaagaaatccaccgaaactggctatcgcaaaaatcacacggccagcttactgacgggaaactggcaggaaagcagcgaaagtgaaagtctgaagaaaagccaactacgagcgggcgataatctggggctaacggccggcaacgcggtggtcagtcgcgcaggcaatgtgcaagccggtaaagatttgctggtcacggcggaaaaggtgcggattgacgtgcagaaaaccgccaatagaaaaactcagaaagataataaaacggcctggggcggaattggcggcggtgataataaagacaatgccaatttacaggaaatcagccaggcttcagaactgacggcgggcggtaaacttttggtgtccggtaatcagggcgtcactattaccggtagtaaagtaaaagggacgcagggcggttttgtgcaaacccaacacggcgatttggtgattgataatgccgtgagtaccactaccgataaagtgaatagccgcaccggaaccgtattcaacatcaccaagggttcacaaaagaccaataactccatgcagcagactgtaggcagtgaactgaaatccgatgcggatttaaaactgttcagccagcaggatattaccgtggtaggcagtttggtgaaaagcgcgggcgagctgggcattgacgctctgggtgatgtcaatgtgaaagcagccgaactgcaacacaaaatcgatgaagagaaaaccgctttaagcctgaaaggccacgcggagaaaaccggagataagcaatatcgcgcgggtgttaatctggatcacactcgcgataccgaaaataccgaacgcagtgaaaacaaatcttcaaccctgagcggggggagcgtgacgttagcatcgggtaaagatgtcactttcactggctctcagctggtcgctcatcacggcgatgccaaagtcagcggcaacaatgtcacctttacagcagcagaagatcaaaccaccagtgaaagcagccacgccaaaaccggcggcggtttctattacgtgggcgggatggataaagccggcagtggtattcaggtggggcatgaaagcagcaaaactcacagcgatggcagcaaagcgctggtttctgggactcaggtcagcggagatttggtgattgcggccaagggcgacctgactcatcagggcacccagcaacagattggtgggaaatatcaggttgatgccgataatgtccacaatctggcggctaaaaatagcgataacagcacaaccacaacgttgaaagtgggcgtagatatcggtgtaaacgccgattatagcgccatcactcgcccgttagagcgcgccggtggcaaggttgccagcctggatgctggcggtacgcttaatgatatcggcggaataggtgcgccgaacgttgggattgatgttaacgccagcggtagcagcagtgatgtgcgtaaaaacagcgagcaagcggtagtgaatacggtgaatgccggtgatatttccatcaatgcagggggagcaatccgcgatcagggaacgcaatacaaagctaatcagggcggcgtcaccttggatgcagaaagccatagccacgaagctgcggtgaatcgcgatcagaccgttagtcgtgaaacgaatggcagcgccggcgtgcgggtttacaccacgaccggtagcgatgtggtcgtggatgctaaaggtcagggagggacgactcgcagcgataaaatcaatgagcaagccgttgccggtggcatcagcgcggtagacggtatcacgattcgggttaaagacgacgcgcgctataccggaaccgctctcgacgctggaaaaggtaaagtcaacgtcactgccggtggcgatatagcttttgaacaggcgaccgaccgcgaaaccgaaaatcatagcggcttcaacgtgaaggcttctggcaaaggtggtttcaccgcagatagcaaaagcttcggcggcggtttgggcggtgactatgacaaaggggaaagcaagacgtctcacgctaacgtgagccaattacagggcttgcaaggcgtagaattgaatgccggacaggatttaacgctgcaaggcagtgaaatcggcagcaaagatcggccggtgggcgatgtcacgctgaacgggaataaagttgatttgcaggccgcacagtccagccattgggagaaaagcactaagttctccggcaatctggacgccggtggcagcaaaggggaaaccgataaaaaaaccagcgctggcggtaacttcggctttgccgcagattacgccaaagtcgatcaatcgaccaacgacgctcaaggcggtggtatcactagcagcggcaacctgaatattcaggccaacggtgataatgagcaagccattcacctggaaggtacgcaggtgagcagcaaaaataccgttttgaatgcggataatggtggaattgtgctggaatctgctaaaagcggagagcacaaagataactggaatctgggaggcaaagccaacggtaaactcggccaaagtttcggtaaagatgagcagggcgcggtagacagcgccagcgggaagaaaacccacacggcgggcgtcggcgcgaccttcggtctcgatcgtaaacaggcaggcactcagcaaaatacccagattgcgaccggcgatctgagcttctccagcgatgcggatacggttctggccggcgcgaaagtcaaagcggataaagtggacggcagcgtgggcggcgatttgcgtattgaaagccgcagagacaccgaacaaagtctgaaagttggcgttgacgttggattaagtcataccaacgatccgaacagcagcgtggtttccaaagtctctaaagtcggtacgccacgttacgcggataaagtaaaagaaacgctggaaggcggcgcgaacaaagtcttcgataaagccgaggagaaatataaccaaaccgctcgcggtctggacagcaaacaagataccaccaacggcgtcagcttcagtaaagccgaggataaagtgaccttgccggaaacgctcgccaatgagaaagagggcagcgcgctgtgggataaaggtgcacgtaaagcgggcaatgtggccaaagagagtcttttaggcccggcaggccgtgatgggcactttaaggttaccgccgatgtggtgaaaaacgatgccgttggtgaacaaactgcgctaagtggcaagcagggcgtgaacctgaccgtacaaggtaaaactcagctgatcggcggccagatcggtagccagaaagggcaagttgacctgaacagcggcggtcttgagcaaagtgatatgaatggcaaacgctatcacggcggcggcagcgccgatgtggcagccaccgtaggcagcctgttgagcggcagcaccaaagatattctttctggggattcaccgttcattaaagtggataaagggacgaccgaggttagcgatgctcgcggcgcgattatcagccataaaacggttaaataagcgggagcgataagaggttattctttttagatcaaataaataatagcccacgctaacggagttattcgttaagtgggctattttctcttacatgatcacatgatcaatcgttacatcaccaattttccgcagacaatcaatgcccgcgcaccatcggttttacatccgttctaccgtttcaatacccaaagtatccaaaccttgcttcagcgtcttggcggttagcatcgccagtttcaggcggctttgacggctttcttcgctatcggcgttcagaatctggcagtgctcgtagaagctagagaacaaaccggccacatcgtacagataggcacacataacgtgcggagtgccttcgcgggcgacgttagtaatggtttcttcgaattgaagcaaacgggttgccagtgcggcttcgcggtcttcggtgatgactaacggcagcgtcaggctgctcgcgtctaccacaccagcgcgtttaaacactgaaactacgcgggtataagcatattgcatgtaaggcgcggtattgccgtccaatgccagcatattatcccagtcgaagacgtaatcggtagtccggcttttcgacaggtcggcgtatttcaccgcgccgataccgaccgcatttaccacttcggccagttcatccgcaggcatatccgggtttttctccgcgatcagcttacctgcgcgttcgatagcttcgtccaacagttcagacagcttaacggtgccgccagagcgggttttgaatggtttgccatctttgcccagcatcatgccgaacatatggtgttctaacggcacggattctggaacataaccggctttacgcacgatggtccaggcttgcattaaatgctgatgctgccgggaatcgatgtaatacagcacccggtcggcacccagcgtttcgtaacgatatttggcacaggcgatatctgtggtggtgtaaaggtagccgccatcctttttctggataatgacgcccataggctcgccttctttatttttgtattcatcgaggaatacaacggtagcgccttcgctctcaaccgccagacctttcgcttttagatcggccacaatgcccggcagcattgagttgtacagactttcacccatgacgtcgtctttggtcagagtgacattcagacgatcgtaggaaatctggttttgcgtcatggtgatatccaccaatttacgccacatggcgcggcaatattcatccccgccctgcagttttacgacgtaagcgcgagcgcgagccgcaaattcttcgtcttcatcgtaatttttcttcgcttcgcgatagaaagcttccagatctgacagacccatatcgctggcgttctcattctgcattttttccagataggcgatcagcatcccgaattgggtgccccaatctccgacgtggttagcgcgaatgacattgtgacccaaaaattcaagcgttcgcgcggcggcgtcaccgataatggtggagcgtaggtgacccacatgcatttctttcgctacgtttggcgcagaatagtcgataaccacggtctgaggctcaaccggagcaatccccagttttggcgcagtcagggcaaactcgactttctcggcaacccattggcggtcgaggaagatgttgataaaaccggggccggcgatctcgactttgctggcgataccctcaagatccagcagctcaaccactttttcagccagttgtcggggttgcataccgagttttttggcaacggccatcacgccatttgcttgataatcgccaaattgggcctttgcggactggcgaacttgcgcttcgctgtcgacgggggcacctgctgcaatcagcgcctggctgactttatctgaaagaagagcctgaatattcaccgggttaccttaattacggacatgaggcgcaaaaatgcgccctgttaatatcaacgggtctggcgtcacgcacgcggtttctctacgcgggagggccaaccacaaaactgctgggtttatatcatatttgcccgccgacgtcagcagggggaaagccttccgcttgtgctatctcagcgctatgttcctaacgaacaaaaacagtgcttttatcggttatttcaacagcaatagcggagattcatcgacaaaactctgttgttcgccgctgaaaacggtaaattatggccgattcgctttcccccccgatgaacggagagaaaaccttatgcaagccttggcacacattaccgaattacaggatttggtacaggatttaccccgttttgaacaacagctgacggattttgcgcaacggctcaatttggacctcagccagttcaccgccgaccacatttctctacgctgtcaccaggccgctacagccgatcgctggcgcagcggtttgcttcagtgcggtagcctgatgtcagaaaatcttatcaatggccgccctatctgcctgtttgatttagcgctgccgttgtccgttgggccttggggaattgattgcgtagaattgccttatccgggaaataagcgttatccccatgaaggctgggagcatattgaactggtattggccggcaccccggaaacgctgtactcgcgggcgttgagcctgctaccggcagagtctgacctaccggtaggcgtgaccttcaaattcagttcgccaaaaggggaagccgaacgtttggctaaccccacgctggcggtaagcaacggcgcgattaccattaagttccatccctatacattaaggcaaattattgacagtgagcacaatagttaacgtgtttaggttatttatctcgctcaggattatcacttatggttatcactgtgactgacctctagtcattattttgaattgaatgccatagtaaggctttcggcagtcttgatgagatgacctttgggcttgagtgataagttctgcatccaatctatcagacggcggaatgattgatttacgggtggtgaaatgagctgtagcagatgtgtttgtcaaaaggggagagataatgactaagttagaaatttgttgctatagcgtcgattgcgcgcagaccgctgagcgcgctggagccgatagaattgagttgtgctcaggtcagtctgaaggcggcctgacgccaagtttgggcgcgctgatgcaagcgcgtgccacggtaaccattccggtccacccgatagtccggccgcgcggtggtgatttctgctatagcgagagtgattttgcgatcatgaaaaatgatatcgcacaaattcgggatatggggtttgccggagttgtcgtcggcgtactggatgaagaagggcacattgatttgccgcgaatgcgtgaaatcatggagatcagcggcccgctggcggtcactttccatcgggcatttgatatgtgtctgaatccgatggtggcgttggaacagttaacgcagttgggcgtggcgcggattttgacctccggccaacagcaaaatgccgagttggggttaaccttactgcgcgatctggtgaacgcgacccaggggccgattattatggccggtgccggtgtgcgcttgtcaaatatgcagaaattcttagaaattggcgtcacggaattacacagttccgcaggccgcacacgtccttccaccatgcgttaccgtaaagccggtgtcactatgtgtgcagataacgatgtggatgaatttgctcgctattgcgtggatgaagaagtggtggaggcgatgaaaagcctgttatgtattaccgaaccgctgccacgttccgcctgatagtcctaaataaaaaagccccgacgcgtgatgttcggggctttttttatgccggaagagagccgattgtgattaaggcttacgggcaatcagtaccgctcgcatcggtgccggatagccttcaacggtcttgctgctgtcgttgggatcgaggaattcagccagtgactcgctagtcatccaatcggtacgacgctgctcgtcggtggttgtgagcgccacgtcggcgattctcacatcgacaaaaccgcatttttccagccagcctttcagcgccagcgctgacgggatgaaatacacgttgcgcatttgcgcgtaacgatcgcccggcaccagaacctgctggctatcgccttcgactacgatggtttccagcaccaattcgccgtcgctgactaactgatttttcaactgatataagtgatctaacggtgaacgacggtggtacagcacgcccatagagaaaacggtgtcaaaggccgccagctccggcaattgctcaatgcctagcggcagcagatgggcgcgctgatcgccacccagcagttttcgtaccgcttcgaactgacataaaaacagctgcattgggtcaatgcctacggccaaatgcgcgccttcgccgatcatgcgccacatgtgatagccgctgccgcagccgacatcaagaatcgttcgacctgccagcgggctgatatggggcagaacgcgatcccatttccagtctgatcgccattcggtatcgatatccagcccgtataatgaaaacgggcctttgcgccacggcatcagcgcgcgcagcattttttccatgccctcgcgctgaccggctgacagcggcggggtgatgtccgcgcgcacgccgtctttcaaattcagttcggtaggtgtcaacagcggcagatgctcaacggcgttaaaccaggttttgaacttaccgtgcagggattcacgctgccagcagcttagctgcgccggcagggtttccagccacgggctaagtggccctttggcaatcagtcggtaaaaatcaccgaattcaatcattgggcttctcctgctttcagagcaatcaacgaaccaaaattaaagcactggaaccatacttcggcgtgttcaaaaccggcgcggcgtaaacgcgctttatgggtttccaccgaatcggtcagcataacgttttccaacatgctgcgtttttggctgatttccagctcgctgtagccgttcgcccgtttaaaatcgtggtgcatgttaaacagcagatcgccgacgttggcatcttcaaaactgaatttttccgataacaccagtgcaccaccgggacgcagccccgcgtacacctgattcagcaagcgctggcgattggctggctccaggaattgcagagtgaaattcagcacgaccattgaggcgttttccagtttcacatccagaatatccgcctcgaccacttccaccggggtatcggcgcggaaagcgtctaaatggcgacggcagcgttcaaccatggcaggggaattgtccacggcaatgattttacagccgggaacctgaatattacgacgcatggccaaggttgccgcgcccaaagaacagcccagatcgtaaacctgactatcaggttgtacaaagcgctcagtcaacatgccaatcatcgaaataatattggaataaccgggtaccgaacgctggatcatatcggggaaaacctccgcgacgcgttcgtcgaaagtccaatcacccaatttggcaatgggcgcagaaaacaggctatcccgcggcggttgcgtggattctgtgtgcggctggcttgccggcatagcatcagttgctggtttggtatcgcgatttggcatgacggtcattgagattgctggaaaatgaaggcgcgtattctaacagaaacgaccggtttttgctaaaaccggttaaacctgagtgacaggaaaatttgtccttgataatttaaagggattggtcgcttactcctggttattccgtggctatagcggcctgagtcgctgctatatgggttcggttatcgttgaatatataaccggtggatttaacagcaaccagtgatgtctggtgttattatccgttgcgggaataattcagggatggatgatgagaaagattatctttttaatcggcttagtggtggtggttttgagcagctatgtactgcgctatatgccgctttacctggtattcatgctttttatttgcttgataatttatggcgcaggtatctaccttaaccccagattaacgacctcaaactggcaccttgggcagaaatgtcagatcaatggtgcgacggcggtctctttgagcgtcttatttttaatcttagtgacgtgtagttcaaccatcggctgggcttattatatgtcgaccaagccttggtatcaggaagatagcaacggctatcagacgcatacgctgtccgccactagccggaaaattgcccaggtgcataatgcggtattgaagaaagtcaaacatccagaacgagctgaattcctcggagattatatcagtccctccgaggggttaggagtgatttgcggctacctgaactatcaggatcccgcaggtgaagacgatgattattatcgctatgtttccaatggcacaccatccggcacctttttacagctgcaaaccgaaagtttttccgcggtgtggacccaattctgtttggataaaaactgaaaatagaatcgtggttgaccgcatgaaagcgtgtctgaacagcgggagggaaagaggcggggtaacacgggaaggggaaaaccggataagctaaggtgagaaagctggaacatgaaggcggtgataaaccgcccgaactaactgtggttccgataaaagaacgcataaacagtgaaaccggggattaagttaagctaaaaatctgttcccacggtaaatagtagatattagcgattatcattagtatcaatgaaacataagttgcactcatccctgaacgtcgccagcgaatttcccggtgacgtaacccgtaatagtgtaataaacgaccgacaatcagcattaatccacacagatgaatcatccaggtctctgcgccgttcatttccatcataaccagcaataccacggcgatcggaatatattctacggcattgccgtgtacccgtatggccgtttgcaactcataaaacccaccgtcgccataggctacccggtactggtttcttaatctcaccacatcaaatgaaagcttaattagtaatagtgcgcccaacacaacataaagcgagctaaccatttttaactccatagcccaaccataactggctgaataatgataaccgtcaacgtcgtcactgtcgctagaaaaatcgaaagtctactatctataatcgctgttgtttatagagtagaaataaatacctgccaccattcagccttgcattttgtcgaaatgagcgtcagttctcatttttcaccgatttctggcgtttctactcttttaaatgtgcgacttctcgccgcccttcattttgatgcaaatcatgacaaactgccgggattggacaagggaattttctgctaaaacaatgtgttttgctctggccaatccggcgcgggaggtaaagaaggtattaacgccgctagccgttgccagattttttgcgcttgctgcggtgaatcgccattatccggcgtatgaataaacagataaggctggtgctgatgctcccataccggcagtttttgcagccagggggcgaaaagtttcagattttcatccagcctatcgccgccgataaaccgcaccagaggttgatgaccggtaaccacggcatgtaccggcagtttgggttttttactttgcgcgtcccgcaccgcggcggtattgggtgcggcgctgtggatcggacggctatcgagaataacccggttaacttgccgttggtgcaaaccttgattgagcgccagttcctccccgcctttggcaaaaaaagccggatgccgaacctccacaccatagttaaagtcacggggtaatcggtcgagaaagtgaaacagccgcggcaattcacgcggcccaaaggcggcgggcaattgcagccacagttggccgatacgctgattgagcggttccaacgtctgataaaaggttaataattcctgctcgcactgactgagtgccgcctgatggctgatagtggcggggaatttgaagcagaaccgaaagctttccggtgtcatatcccgccagcgcagcacaatttccggtttcggcagcgcataaaaagtggtgttgccttccacgcagttgaaatagcggctgtaatccgccagatcctgcaaacctaaccggctccatgccgaatgttgccattgaggtaatccaatatacataagtcagccgctgcgaaagaaagaaacaacgcggctcagctcacaaacgaagccgctaaaaggtacccttaccttaacgtcaggcggttagcgcggcaataatttcattgctgctacggacgcgagaaaaacgcgggaagatgtggtggaagctggcctgatgctgctcggtgtccggagcgctacaggcgtcttcggcgatcaccagctcgtagccgtgttcccaggcggagcgggcggtagattcaacgccgagatttgtcgcaatcccgcccaacacgatggtttttatcccgcgccggcgcagttgcagatccagttcagtgccgtaaaaagccccccattggcgtttagtcaccagaatatcgctatcgcgaaccttcaactgcggcgggaaatcccaccagttggcaggtaaacggccagccgggtttgggcgatcgaccggcggatgcaatacgtcggcaaaatctcccgaccagcccacgcgcacccaaaacaccggagcgcctaattgacgaaactgttcggctaggtgtgcaccatgattgacaacttgttcggcactgtacgggccgccggcgtaagggagaattccctgttgcaggtcgatcagcaccagtgcgctggtttttgcttcaattttcatcatctttggcctcgaacagacatgggctaaatgaggtttatggcctctggtgcctccgagtttatgccaacaaatgttgccgaacagtcttatcacggggagaattttgttaaatgatgtgttaaatcaccgcagagagtgactttgtcgtccctgacctgtgcgttcgctcttatctatgccatgaatttcctttataatgacccccttttttcaacactctttaatccaaaatacctatgccaatttatgaatatgcgtgtagcgcgtgccaacatcgattagagaaactacaaaaattttctgatgcgccactgacagactgtccggcgtgtgggaagcctgcgttatcgaaacagatatctgctgccggttttcagctgaaaggcaccggttggtacgccactgatttcaaaccgggtgccaaaaaacagggttcaccagagtaagggttcaccagaataatagccgcgcgaacagttcagaacactcgacgggcgcggcatcggctgagtaaaaggacattgtatgcgtactgagtattgcgggcagttgaatctgtcccacgtgggacaaagcgtcacactttgtggttgggtcaatcgtcgccgtgacctgggtggcctgatttttattgatatgcgtgaccgtgacggcatcgttcaggtgttcttcgatcctgaccataaagcggcctttgagcaggcttctgagctgcgcaatgagttctgcattcagattaccggtactgtgcgtgcgcgtccggaaagtcagatcaataaagatatgtctaccggtgaagtggaaatctttgccaactcactgaatattatcaaccgttctgagccattgccgctggactccaaccagatcaacagcgaagaacagcgtttgaaatatcgctatttggatctgcgtcgtccagaaatggccgaccgcctgaaaacccgcgctaaaatcaccagctttgtgcgccgctttatggacgatcacggtttccttgatatcgaaaccccgatgctgaccaaggcgacgccggaaggtgcgcgtgattatctggtaccaagccgggtacataaaggcaaattttacgcgttgccgcagtctcctcagctgttcaaacagttgctgatgatgtctggcttcgaccgttactatcagatcgtaaaatgtttccgtgacgaagatttgcgcgccgatcgccagccagaatttacccagatcgatgtggaaacttcctttatgagcgccgatcaagtgcgtgaaatcatggaaaaaatgattcgtcagctgtggcaaaccaccaaaggcgttgatctgggtgatttcccgatcatgacttttgcggaagccatgcgccgcttcggttcagataaaccggatctgcgtaacccgttggagctggtggacgttgccgacttagtgaaagacgttgaattcaaagtgttctccggcccggcgaacgatgcgaaaggccgcgttgctgctattcgtgtacctggtggcgcgcaactgactcgtaaacagatcgacgaatacggccagtttgtcggtatctacggcgcaaaaggtctggcgtggttgaaagtcaatgaccgtgctgccggtatggaaggggtgcaaagcccgattgccaaattccttagtccggaagtgttggaggccattctggctcgcactcaggctgaaagcggcgatattctgttcttcggcgcagacagcttcaaaatcgtcaccgatgctatgggcgcactgcgtctgaagctgggccgcgatctggaactgactaagctggatagctgggagccgctgtgggtggttgatttccccatgtttgaagacgatagcgaaggcggtctgacggcgatgcatcacccgttcaccgcgccgaaggacatgacgccagaagcgctggcagcgaacccgacttctgctatcgctaacgcctacgatatggtgattaacggttatgaagtcggcggcggttccgtgcgtatccaccgcaccgaaatgcagcagcaggtctttggcattctgggcatcaatgaacacgaacagcgtgagaagttcggcttcttgctggatgcgttgaaattcggtactccaccgcacgccggtttggcctttggtctggatcgtctggtgatgctgctgaccggtactgataacatccgcgacgtgattgcgttccctaaaactaccgccgcggcctgtctgatgaccgacgcgccgagttttgccaacccggcctctttgcaagagctatcgatcagcgtcgtagcgaagaaaaccgcagccgatactccggcagaagagaaagagtaatgaaatacaaacgccccgagtcaattttggcgctgatctatgcccaatctacgggtcgggtgctgatgttacagcggcgtgatgaccctgaattctggcagtcggttaccggcagtctggaggagggggaatccccattgtctgccgcgcagcgtgaagtaaaggaagaagtgggcattgatatcacaggtgaaaacctgacgctgctcgactgtcagcgctgcgtggagtttgaactcttcgcgcatttccgtcctcgctatgcaccgggtactacgcataataaagaacactggttctgtctggcgttacccgaagagcgtgatgtcaaacttaccgaacatcatgcgtaccagtggcttaactcgccggaagcggcggcattgactaagtcctggagtaataagcaagcgattgaagagtttgttatttattaggtctaattaggctattttcggagattcttatggcaggtcatagtaagtgggccaacactaaacaccgcaaagcggcgcaggatgccaaacgcggtaagattttcaccaaaattatccgtgaactggttacggctgccaaattaggcggtggcgatccggctgctaacccacgtttacgtgcggctatcgataaggcattgtccaataacatgacgcgcgacaccctaaaccgggctatcgcacgcggcgtgggcggtgacgaagataacaacatggaaaccatcatttatgaaggttatggtccgggcggcaccgcggtaatggttgaatgcctaagtgacaaccgtaaccgtaccgtatctgaagttcgccacgcctttaccaaaaccggtggcaacctgggcactgatggttccgtttcttacctgttcaccaaaaaaggcgtgatttcttacgccccaggtctggatgaagataccgtgatggacgcggcgctggaagccggtgccgatgatgtgaccgtgtatgacgatggtgctattgacgtgttcactgcgtgggaatctctgggtcaggtaaaagacgcgctggatgcggctggtctggtggctgaatcggcggaagtgtcgctgatcccatcaactaaagccgatttggatgcagagactgcgccaaaactgctgcgtttgatcgatatgctggaagattctgacgacgtgcaagaggtttaccataacggtgagatctccgacgaagtcgctgctacgctgtaatgagcggcaatcagcgtgatttcatgtaagtcatcgcggcaacagcgttaaagcagtaaagtcgccgtgctcattattgggcacggcctatttttaggtgggtgtggttcccaacgataacggacaaggtgaaaactggtatggcgatcgtattaggtatcgatcccggttctcgtgtcaccggttatggcgttatccgccaggaagggcgccaactgacctacctgggcagtggttgtatccgaaccgtggtggacgatttaccgacccggttgaaattgatttacgccggtgtgactgaaatcattactcagtttcacccggacttttttgctattgaacaggtgtttatggcaaaaaacgctgattcggcgttgaagctagggcaggcaagaggcgcggccatcgtcgcggcggtcaatctggatctgccggtgtctgagtacgcggcaagacaggtgaaacaaacggttgttggcaccggcgcggcagagaaaagccaggtacaacatatggtgcgttcattactgaagttaccggctaatccgcaggccgatgccgccgatgccttggcgattgcgattacccactgccatctcagccagaatacggtgcgattgggtaataaccaattggtcatggcacgtggccgtttgcgttaattttgtgcaacggcgcgcaaagacccgataaagccgggttaatcgctgaaggctggatatccatccagccttttttatgttataaacagctataaaatatattcatcgataaacctgccgggcaaggagacagtcaaggtgatagggcgcatcagaggtatcattctggaaaagcagccgccgctggtgctgctagagaccaacggcgttggctatgaaatccaactgccaatgacctgtttttatgaactgccggagatcgggcaggaagccattatctttactcagtttatcgtgcgggaagacgcgcagttactctatggtttcaatgataaacaggaacgtgcgttattccgtgaactgattaaggtcaacggcgttgggccaaagctggcgctggcgattctgtccggtatgtcggcgcagcagtttgtcggtgccgttgaacgtgaagatatcactacgttggtaaaactgccgggcgtaggaaagaaaaccgccgagcgtttagtggtggaaatgaaagaccgcttcaaaggcttgaacggcgatctgtttaataacaccggtgagatcccgttgcctaccacctcggcgcaggtttctgcggcagacacggaggcagaggccgtttcagcgctggtggcgttgggatacaaaccccaggaagccagccgtttggtcagcaaaattgccaagcccggcgcagactgtgaaacactaattcgtgacgcgttgcgcgcagccttatagtagtgacagcaagaggtagaggatgattgaagcagaccgcctgatttcggctggcgttatcagtgaagaagagatcattgaccgagcgattcgccccaagctattaagcgaatatgtcgggcaaccccatgtccgcgagcagatggaaatctttattcaggcggcgaaacagcgcggtgatgcgctggatcatttgctgatatttggccctccgggtctgggtaaaactacgctggctaatattgtggctaacgagatgggcgtgaatctgcgtaccacttccggcccggtactggaaaaagctggcgatctggcggcgatgctgaccaaccttgagcctcatgacgtactgtttattgatgaaattcatcgcctatctccggtagtcgaagagattctttacccggcgatggaagattatcagttggacataatgatcggtgaggggccagcggcgcgttctatcaagctggatttgccgccctttactttgattggtgccacgacgcgtgccggatctctgacttcaccgttgcgggatcgctttgggattgtgcagcggctggagttttatcaggttgcggatctggagcatattgtcagccgtagcgcccaatgcctgggattggaattaacgccggaaggtgctcatcagctggcgcgtcgatcacggggcacgccgcggattaccaatcgcctgctacgacgggttcgggacttcgccgaagtgaaagccgacggtgccattaatggtgatgtggcgatgaaagccttggatatgctgaatgtggatgcggaaggctttgattacatggaccgtaagctattgctggcagtgattgataagtttatgggtggcccggtagggttagataatctggcggcggctatcggggaggagcgtgaaaccattgaagacgtgctggaaccctatctgattcagcaaggttttatccaacgcactccgcgtgggcgtattgccacgcatcatgcctacaagcattttggtatcgatcgagaagagtaatgttgtaagcggcggagtctgcctgaatgagacaactccgccgaatgactgtgcctgaattaggttttaaaccgtggctttctcggctactggcgtattcaccattcggttcaaccatggaatcatcagccccatcacgactgcaatccccagcgtagtcaaaccgatcttaccgaacacatcggtatagataggcaaggtttccaatgggtcggtaatgccttccggcgtcgcggtgaaggtcgcaacgtagcccccaatcaggaaggatgctgcctgtgtcaggaaccacatccccagaataaagcccatcaaatactgaggcactaacgctgctaccatcgccagacccaaggcgctaatcattaattccccgatactctggaatagataaaccagaacgataaaccaaggtgatgtcaggccctgggcatcggcaaaccacataccggctgccgcagcggtcaaaaatcccagcgagcataagaacatgcccaaagtgaatttggctggcatagtcaaatctcgtcctttactaccaaaacgagtgtagaggctggcgagaatagggctggcaacgaccacccaaaacggattgagtgcctggaagctgactggattaatggcaaaacccagtatttcgtgatgaacgttattaattgcgaagaaatttagcgaggttggcatctgcgcgtacagcacgtagaaaacaatagcttccaacatcaaaatgaaggcaacaaacatcttattgcgccccaatgtatcctgcttgaatgcttctttgaagaaaataaaaaccaccactaatgacagcacgattaacaccagattggcgatcatgacgtgattcatcagccaggcacaaacaaataccataatgaccgtaccggccagcaccagaaacaggtttttccagtttagcggctgggcgtccggctcggatcctatatggcgaaccatatgacggcagcagaaataaaccagcagagcaaagatcagaccgataccgcacagatagtaagtgacagtgtaaccatagcgttcggcgataattggggctaacgacagagaaagcaacgaacctacgttaattgacatataaaacagggtaaaagcaccgtccaagcgaggatcttttggcgggtagcacttggataataagctagctggattagctttaaataaaccattcccaacagcaataatccctagggcgataaaaatcagattaggccggtacaaggataaaccggtagcgaaataaccaatggccagcaccactgcacccagcaccatggtgcgcttggttcccagtaaatgatcgccgacgtagccaccgatggaaatcaggccataaaccaaagcggcaaaagccccgaaagtcacaaatgcctgttcttgtgagaagcccagctgtttaacaaagaaaaccgcgagaatgccctgcacgccgtagtagccaaacctttcccacagttcgacaaagaagatcataaagaagggtttgggctgctgtaataaaccggttggtgtgggtttatccatgatggtttgcctctgaataatagttatgagtgggtagggcgcgcacaaatccgtcccggcgcgataaagaaagccgaatagaatagtgaaaatgttttctcaaaaagcaacgacggcagagtattacactgggtgaatattatgtttgtggctgatcacactaattaaaacttactgagtggtttttgtatccgacatgtttatttcgtacagaatgttatcaaattcaaaaaaatataactgaaataacaacggcgtaagcggttgcgcccaaaggctatttgggagggaaaggtgaatatcagcaaaatgcgggataaataagcaggcgaaataagaaacaggaagtataaagcaggaggtaagaggaaaagtataagaggtcagaagtccaaatcaacgcacggagggagctgcgaacttgctccctccgcagagctttatcctctgggtttttgcgacaggcttagcacaaacatcattgcggcgcagagcaccacggatgggccagctggcgtatcgtacagcgcagagaaggtcaggccgccggttacagcgagaatgccaatcaccacggcgaccccggccatttgctccggcgttcgggcaaaacgacgggcggcggcggcgggaatgatgagcaatgacgtgatgatcagtgcgccaacaaatttcattgataaaccaatggtcaacgcggtaattagcatcaacagcattttgacccgctgtaggttaaccccgtcaacgtgtgccagctccgggctaatggtcatcgataacagcggccgccactgccagcgtagcaccagcaataccacggcgacgccgatggcaatcatccagatatcattgagggtaactgaaagcaggtcgccaaacagataggccatcaggtcgacccgcacatttgacattaggctgacgacgactagaccgagcgacaatgcgctgtgcgccatgatgcccagtaaggtatcgacggccaactgcgggcgacgttcgagccacacgagaaccagagccaatatcagcgtcatggcgatcaccgcgtaaaacgggttcacattcagcagcaggccaaatgccacgccgagcagcgaggcgtgagccaaagtatcgccgaaataagacattcgacgccagaccacaaacgaccccagcgggccagcggcgcaggccagcaggacacccgctaaccagccgggtaagagtaattcgatcatgcgtcacggctccctgggttttttagaataattttgccatgcaaatcgtgacgatgattatggtgatgacggtaaacggccagtttttcggcaccgcggttgccaaacatggcgatgaattctggatgggtagaaaccacttctggcgctccggaacagcaaatatgttgattaaggcataatacttcgtcggttttcgccataaccagatgcagatcgtgggacaccatcagtacgccgcagcccaattcggtacgcagttgttcaatcagatcgtacagtgccagctgcccgttgacatcgacaccttgtgtcggttcatcaagcaccagcaactgcggcttattcaacaaggctctggctagcagtacccgctgattttcccctccggacagtttctgcatgggctgttctaataaatgggcagcatggacgcgtttcagcgccggtaaaatatccgcttgcttcacgccgggcttaaggcgcataaaacggctcaccgtcagcggtagagtggcgtccagatgtaatttttgtggcacatagccaatacgtaatccaggctcccgaaccacggaaccgccggtaggggcgatcaatcccagcaccacacgaaccagcgtcgattttcccgcgccgtttggcccaagcaaagtgaggattcttcccggctgtaatgagagggaaatatcagcgagtacccgccgattcccgaaggtaacggatattttgttcagacttaccaatgtggacatgatgattacgtttgcagaattaagtgaatgttataatattacgcttttccagcggaaaggacgagttaacttaccatgttcaagagaaataacgttatgttacaaaaaaaccaatggctacgaagaaccctattagccagcgccgttttgatggcaggtgtggtacatagcgcatcagcagcggtagtcacctccatccgtccgttgggatttattgcggcttctatcgctgacggcgtgctgccaacggaggttttactgcccgacggcgcttcgccacacgattatgcccttcgtctgtccgatgtccagcgtttacgtcaggctgagctggtaatttgggtgggaccggaaatggaggcctttctgataaagccattgacgcaagtccctgccagcaaacagattgctgtttctcaattgactcaggttgcagcgcttttaatgaaaggcgacgagcatgatgaacatgaaggtgagcatgacacgcatcatgatgatcatgcagcgaataatgatgaacctggacatcaccacggtaagtacaacatgcatgtttggctttcgccagagatcgctaagttgacggcaattgctattcacgaccgattattggaacttatgccacaaaatcgggacaaactagatgcaaacctgcgccgattcgaggatcaactagcgcaaagtgacaaaaaaattgctaatatgctgaagcctgtgcagggtaagggatattttgtttttcatgatgcctatggctactttgaaaaacactttggcttggccccattgggtcactttacagtcaaccccgaaatacagcccggcgcacagcgtttacttcaaattcgaacacagttggttgagcaaaaggcggtatgcgtttttgctgagccacaattcaggccggccgtcattaatgccgttgccaagggaactcaggtgcgttcaggcacgctggatccattgggtagcggcatcgcattgggcaaagacagctacacagagtttctgtctcagttgtctgaccaatacgagagctgcctgaagtaagacttataaggatactcataagtgcagcagatagtccgaactatcgctctggcgtataacaacttaccgcggccccatcgagtgatgttggggtcgttgaccgtaatgaccttggccgttgccgtttggcggccatttgtttatcacccagaacacgatcccatcgcgaagagcgttattcttgataccagccaggcgaacattttggctccagaagccagtgagccgctagaccaaccgagtccggacgatgagattcctcaggacgagctggacgctaaagatgttaatgaaagtggcgttcatgaatatgtggtttccaccggcgatacccttggcaatattctgactcagtacggcatcgagatgtccgatgtggcgttactggcttcgcaaaaccgcgacctgcgtaatctgaagatcgggcagcaaatttcctggacggtgaacgattccggcgatttacaacgcctgacctgggaagtgtctcgccgtgagacgcgtacttacgatcgcgttggcaatacctttaaagaaactaaagagttgcaaaaaggtgagtggcgtaacagcgtaatgaccggtcgtctggacggcagtttcgttaacagcgccaagaaagccggattgaacaactcggaaattcgcgctgtgactaaagccttacagtggcagttagatttcagtaaattgcgtaaaggcgatcagttcgccgtgctgatgtcgcgggaagtgctcgacgggcgcagtgagcaaagccaattggtcggcgtgcgtatgcgctccggcggcaaagattactatgctattcgcgccgaagacggcaagttctatgatcgtcagggttccggtctggcccgtggctttatgcgttttccaaccatgaagcagttccgcgtgtcttccaactttaatccacgtcgtattaacccggttaccgggcgtgttgcgccgcacaaaggcgtcgattttgctatgccggtcggtactccggtactggcggtgggcgatggcgaagtagtgattgcgaaacgcagcggcgcggcgggcaactatgtggccattcgtcacggtcgccagtacaccacgcgttatatgcatttgaaaaagctgctggttaaaccgggtcagaaagtaaaacggggcgatcgtatcgcactgtctggaaataccggtcgttccaccgggccgcatttgcactatgaattctggatcaaccagcaggcggttaacccgttgacggctaaactgcctcgttccgaaggattgagcggtaaagaacgcagcgattatctggctattgcgaaagaagtgatcccgcagttgcagctcgactaaccggtaattccactcaggaattcttgagcggaataaataaaatctaatgtggtcgttatggtgatattcattgtaacggccacgttggtgatcaacaggtcaggttttttagcctgatatcagtttttacagtcagatggacaattgcattctctatcttcgcaattatgattagctgattggcctattcgaagagtttcctgatgcaaaaagagaagaacgacagcgcgggttttattccggtattccaaaaatcattccttcatccgcgtttttggggcgtatggctgggcattggcgtgatggcagcgctggcttatttaccggcaagaattcgcgatccttttttagccagtgtaggccgtttggccggtaaattcgccaaaggcgctcgtcggcgcgcgcggataaaccttctctattgtttgccggatatcagtgagacggaacgtgagcaaattatcgatgagatgtttgccactgcgccgcagccgatgatgctgatggccgaactgtgtttccgcgatcctaagcacgtgttgtcccgtgttcattggcatggtgaatctgttttagatgaactccagcagcaagggcgcaacgttattctgctggtgccccacgcgtggtctatcgatattcccgccatgttattggccgggcaggggaaaccggtcgccggaatgttccatcatcagcgcaacccgctggtagattatctgtggaacagcgctcgcctgcgtttcggtggccgcattcatgcgcgcgaaagcggcattaagccttttatcagctcggtgcgtcaggggtattggggctattatctgccggatgaagattacggcgcagagcagagcgagttcgttgacttcttctcgacctataaggccacgctgcctgcggtagggcgtttgatgaaagtgtgccgtgcggccattgtgccgatgttccctgtttataattaccgtgaacatcgtttggatatttatattcgtccaccaatggatgatttagcggatgcggatgacgcttatattgctcgtcgcatgaacgaagaagtagaggctttggttagccctaacttagagcagtacacttggattttgaaactgctgaaaacccgtaaagaaggtgaaatcgagccttacgtacgcaaggatctgtaatccggcgtgagcgggccgcgcgttcagtagtgaaaagtgaaataaaatgcagataaagaaaaagccagtcaacttaacgcggactggcttttttattggcgcagaataattattccacgcgaataatacggctggtgttagtcgtacctatggtacccatcacatcgccctgagtgacgataaccagatcgccagaaaccaggaagcctttatcgcgcaggcagttaaccgcttcattggcagccactacgccatcggtgtggttggcgcaataaaccggcgtgacgccgcgatagatcgcggtcaggttcagcgtatgttcatgacgagacatggcaaagatcggtaaacccgagctgatacgcgacatcatcaaggcagtacggccagattcggtcatggcaatgatcgccgtgatacctttaaggtggttagccgcgtacatcgtggacatcgcgatggcttcttcgacgttatcgaattgcacatctaaacggtgcttggaaacgttaatgcttgggattttctctgcacccaaacagactcgcgccatcgcggctacggtttcagccggatactgacccgccgccgtttctgctgacagcatcaccgcatcggtcccatccaacacggcgttcgctacgtccataacttcggcgcgggttggcattgggttggtgatcatcgattccatcatctgcgtggcggtaatgaccgcacgattcaactgacgggcacgacggatcagttttttctggataccgaccagctctggatcgccaatttctacgcccaaatcgccacgggcgaccataaccacgtcagaggcgaggatgatgtcatccatggcttcgtcagtggctacggcttcggcacgttcgactttggagacaattttcgcgttacagccagcatcccgcgccaaacggcgggcataatgcaagtcttcgccagtacgcgggaaggagacggccagataatcgacgccaatttttgcggcagtcacgatatcagctttgtctttctcggtcagcgcttcagcggataaaccaccgcccagtttgttgatgcctttattgttggaaagagggccgccgacggtgacttcggtgaacactttcatgccctgaacttccagcactttgagctgaacgcggccgtcgtcgagcaacagaatatcgcccggcaccacgtccgcaggtaagcctttgtaatcgataccaactttatctttgtcgccttcgcctttacccaggttggcgtctaacaggaacttatcgccaatattcaggaagactttgccttccttgaaggtggatacacggatttttggcccttgcaaatcgccaagaattgccacgtgacgccccaaacgcgcggcgatttcgcgcactttattagcgcgtaacatgtggtcttcagcggtgccatgggaaaaattcaggcggactacgtttgcacccgcagcaataaccttttccaggttattatcgcggtcggtagccggccccagtgtggtaacaatcttggtccttctgagccgtctggacatgcattactccgttgactggtgaagcattggtgttgttaaaactgcggataattaaccctagggcaaaatgtcactgagtgacgagttttactctgaaattgtgtcatccaaattaaccgcatgcgaatgtagaaacgatagctgtgtaataggttatcggcgcaaaactgaaataaatcagctctaagcgatatttttagcgtcgggcgtttattcaatcaggccctgtaaagacgcgcccttatcaaagcgcgattctttcaacgcttctttgacccgcttcaagttatccctgaatttatcgccgcggcgtaaagtaaatccggttgccagtacatcaatcagtgtcagttgagcaattcgtgacaccatcggcatataaacatcggtatcttccggaacgtccagcagcaatgacagcgttgcttcgtgtgccagcggcgtgtctcgcgaggtaatggcaataacggtcgcatcgttctcgcgtgccagacgggccatttctaccagattcttggtgcggccagtgtgggaaatcagcaccacaacgtcaccttccccggagttcatacaactcatgcgttgcataacgatatcatcgaaataaataaccgggatattgaagcggaaaaatttattcattgcatcatgggcgacggcggcggatgcgcccaggccaaagaaggaaattttcttggcctgagtcagtaagtccaccgcccgatttatcgctgcaatatccagattggttttcaccatatccagactggccatcgtcgattcgaaaatcttgcctgtatatgcagcaacactatcattttcttcgacgttacggttcacataaggtgtgccatttgccagactttgggctaaatgcagtttaaaatcagggaagcctttggtatccagacggcgacagaaacgattaaccgttggttcgctaacgttggccattttcgccagcgtggcgatactagagtgaatggcagtttgtggggaggcaaggatcacctcggcgactttcctttcagatttgctcaggaggtccagattattttggatcttttccagcgtattcatataacgagagtcacccatgggttttgtcgatttcattcaaaggagaaatctatgccggtttaatggaaatatactacgagccgggacccgttggcagaggcattgatgaggaagcagccctttttcatcagaatatgacctgtgtctaattttcagaatggtaaaagacgatcaaaaaagtcataaaattacatttttatcttacgccgccttatttgacggggcttagcgcctgataggatgttttataaccgtttttattgcctttttatccgggtttactggctatagtcaaagagagtacattatagatgtaagaaaattacaaatatcctgcaacgaggagaaatacatggcggtaactaatacagcccaggcatgcgacctggttattttcggcgctaaaggtgacctggcacgccgaaagctgctgccttccctttaccagctagagaaagcgggtcatatccatcctgatacacgcattatcggtgtgggtcgggctgactgggataaagacgcgtatatcggcgtggtgaaggaagccctcgacacctttatgaaagaaaagctggatgacgaactttggcagaagctcagcagccggctggatttctgtaatctggatgtcaacgacagcaagcactttgctaaattgggcaaaatgctcgatcaaaaaaaccgcactaccattaactactttgccatgccgcctagtactttcggtgccatctgcaaaggtttgggcgaagccaagctgaataacgaaccggcgcgcgtagtgatggaaaaaccgttaggaaccgatttggcttcctcacgggtgatcaacgatcaggttgctgaatactttaacgagtgtcaggtttaccgtatcgaccactatttaggtaaagaaacggttctgaacctgttggcgctgcgttttgccaactcactgtttgcttccaactgggataaccgcactatcgatcacgtgcagattaccgttgcggaagaagtgggtatcgagggccgttggggctacttcgatcaggctggccagatgcgagatatgattcaaaaccatttgctgcaaatcctgaccatgatcgccatgtcgccaccggcagatttgaccaccgaccgtattcgcgatgaaaaagtgaaagtgctgcgttcactgcgccgtatcgatcagaccaacgtgcgtgaaaccacggttcgcggtcagtacaccgccggtttcgttcagggtcacaaagtaccgggctatctggaagaggaaggggcgaataagagtagtaataccgaaacctttgtgtctatccgcgtggatattgatgactggcgttgggccggcgtgccgttctacctgcgtaccgggaaacgtttgccgaccaaatgttcggaagtggtggtgtactttaaaaaccctgcgctgaatctgttccgcgagtcttaccaacagttgccgcagaacaagctgaccattcgtttacagccggacgaaggcattgagattcaggtgctgaataaagtgccgggtctggatcataagcaccgcttgcaaacgactaagctggacttgagtttctccgagactttcaacgaagagcatatcgctgatgcctatgaacgtttgttgctggaaaccatgcgcggcattcaggccctgtttgtgcgtcgtgatgaagtggaagaagcttggaaatgggttgactccatcatggaagcctgggcggcggataatgaagcgccgaagccttaccaatccggtacctggggacctgtagcctcagttgccatgatcactcgcgatggtcgttcatggaacgaattcgagtaatcgtttaacagcataaccatcagtaacctcactaccccggtgccgcagacacagccggccgctgaccggcggggtagtgcatccatcagggaatgcctggatgaactcacggacggagcacctgcgcgattataagagccattcaaaggcttagttctgattttgtttcatggcaggcagtatagaagaggcgggtcactttccgtgggtcttcggctgagtgccatcttttaaccgatgcctagaaggcaaccaacatagccctgaatggaaaggcatcaatcctatgtcagacggcataagtggagataacgaccgatgaaaagctggaaaacgagcgcagaacagattatgaccgcaggtccggtggtcccggtaatcgtcatcaataaactcgaacaggcggtgcctttggctaaagcgctggttgccggtggcgtacgcgtgctggaagtgactttgcgtaccccgtgcgcagttgacgcgattcgcgccattgcacaggaagtaccagaagcgattattggtgccggtaccgtgctgaatcctgagcaattggcagccgtgaccgaagcgggcgcccagtttgctattagccctggcttaaccgccgatctgttgcaggcggccaccgcaggcacgattccattgattccaggcattagcaccgtttctgaattgatgctaggcatgagttacggcctgaaagagttcaaattcttcccggcggaagccaacggtggcgtgaaggcgctacaggctatcggcggcccgttctctcaggttcgcttctgcccaacaggcggtatcacgccaaataattaccgtgattatttagcgctgaagagtgttttatgtatcggcggctcctggttggttccggccgatgcgctggagaaaggggattacaatcggataaccgagctggcgaaacaggcggtagaaggcgcagcggcataagctgtctaagcccctgaaccggcgagataatttctgcttttctctagaattgaaaacccccaggttctgggggttttgtatttttgaaataactaaagtgctcttttataaacttttttttctctaattttttcaaattggcggtttgctttctatttttgcctatggtacaaatagctcagttaattattctaatttgatgaggatttgaggcaaatcgcactcggtttcacgaaatatgtgcggctaaaaaagagaaaacattatgattaaaactaacggaattactctcaaaacttctacctgccaactcttcctgtctgccattctagccagtgaacatcactggtgcagcgagctttagcgtcactctcccttaaccggcgcggcatttaactccgcataatccgggcatagcatttttatacgccaagtgagtatctatttcttacggcctacgcacgtctgcaatctgtgatttcagcttgtgcatgaggataaccgtaacaaatagaccttagcgtgcgttttcgcgtgttaggagagattttatgatttattggatttttttaggcttagctatcgttgcagaaattattggtaccctttcaatgaaatacgccagcgtcagcggcgaattaaccggccatttggtgatgtatgtgatgatcaccggttcttacatcttattggcgatggcgattaagaaagtggcattgggcgtggcttacgcgctgtgggaagggatcgggattctcattattactctgttcagtgtgctgtggtttggcgaaacgctgtctccgttgaaaatcgccggtctggtgaccttggtgggcgggattatgctggttaaatccggcacccgtaagccgaaaaaaccgggtcagggcggtggcatcaagctccccggagcgctgaaagccaaagtcactggccagccgacattagcggttaagtcaggtggggatcatgcaacagcttgagttttaccacattggctttttgattctggcggtgattttagaaattcttgccaatattttgttgaaaatgtcagacggcttccgtcgggtttggttagggattttctccctgctgtcggtacttggtgcgttcagcgctttagcgcaggcggtaaaaggtatcgatctttcggtggcttacgcgttatggggcggttttggtattgccgctaccgtcgcggccggttggattctgtttaaccagcgattgaattataaaggctggattggtctgattctgctgctggccggtatggtgatgattaaactggcgtaacaccggggatcgcactgactcagtaacaaactacagaaaagtcacagagaaaccatataaaaacaaaagggtagccggtgcatgcgggctacccttttgtacgatttaacgtgcggcgataattttaatttcgactttatactgcggattcatcaacttagcctgaacggtgcagcgtaccggtgcgctgccgtcaacgacccaagcatcccaggcggcgttcataccggcaaagtctgcagcgtcggccagaaaaattgtcgcatcgaggattttgctcttgctcgaacccagatgattcagcagcatatcaatagcggccagcgtattggccgtttgcgcggtaatatcagcatccagattttccggtacgccggtgtaataaatagtgtcgttatacaccaccgcatctgaccagcgtttttccgggttaattcgttcaatgctcattttcactcctttgtgtgaatatcgttatctgctacctctatcagggtaacataagtgatcgcgataatgtgtgtggtgcctcagcctcatgcttggcataatcagcgctgatttgattcggcagagagaaagtgtgacagacgattttgcaatagacggcgctttagcgcaggcgataaccggttttaacccgcgagaatcacagcgtcagatggcgcaggcgatcggcgaagtcattaccaccaaacaacaattggtggtggaagcaggcaccggtaccggtaaaacctatgcctatttggcaccggcgctgcgtgcagactgcaaagtcattatctctaccggttctaaggccttacaggatcagctgtattcccgcgatctgcctacggtcgccacggcgttgaaatataaaggcaaactggcgttgctaaaaggacgctccaactatttgtgtctggaacgtttggaacagcaaactctggcaggcggtgagctggcgggagaaacgctggtggatttagtccatttgcgcggctggtcgtcacaaaccgtagacggtgatatcagcacctgcggcgatgtggcggaagacagtttcgtctggccgttagtcacaagtactaatgataactgtctgggcagcgattgcccggcttatcaggactgttttgtggtgaaggcgcgccgccgcgcgatggatgcggatgtggtggtcgttaaccatcacttgtttttggcggatatggtggtgaaagaaagcggctttgccgagctgatccccagcgctgacgtaatgattttcgatgaagcccatcagattcctgatatcgccagccagtatttcggccagcagctcactagccgccagcttatggacttagctaaggatatcaccatcgcttatcgcactgaggtgcgagattcggtacagctacagaaaagcgccgaccggctaagccaaagtgcgcaggatttccgattggtgcttggcgatcccggattccgtggcaatctgcgagacgtactccagcaaccggcgatccagcgggctttgctgctgttagacgatgctttagagctgtgctatgacgtaatgaagctgtcgcttgggcgctccgctatgctggatgcggccttcgagcgagccacgctatatcgcaaccggttgaaacgtttgaaagaagtgactacgccgggttatagctattggtatgaatgtaatgcgcgccatttcgtgctggctctcacgccgctgtcggtttccgatcgtttccgcgagttaatagaagaaaaagccggtacctggattttcacttcggccactttatcggtgaacgatcagctagggcattttactcaacgtctcggtttaaccgatgccaaaaccctgctgcttcccagcccgtttgactacgccaatcaggcattgctgtgtgtaccacgaaatttgcccaatgccaatgagccgggcggggcacgtaaactggcacaaatgctcaaaccgatgattgatgctaatcagggacgctgctttttcctttgtacttctcatcagatgatgcgcagtctggcggaggagtttcgcgccagcatgacgttaccggtgctggtgcagggtgaaaccagtaaaggccagttactggctcagttcgtcgctgccggtaatgcgttactggttgcaaccagcagtttctgggaaggggtagacgtacgcggcgatgcgctttcctgcgtgattattgacaaattgccctttacttcaccggacgatccgctattgaaagcgcggattgaagactgccgattgcgcggcggcgatccgttcaacgacgtgcagttacccgatgcggtgattaccctgaaacagggcgttgggcgtttgattcgggatattgacgatcgcggggtgctggtgatttgcgataaccgtctggtgatgcggccttacggtgcggtattcctcaatagcctgccgcccacgccacgtacccgtgatttgaccaaagctatcgctttcctgaaacggcaggagtgagggtaaagccttgtggggtgtgctattatgcgcgccctgtgttgaatatagattctttttcctgccgaggttggcatgtccacgcgaattttagcgatcgataccgcaacagaagcctgttctgttgcactctggaacgacggcgcgatccacgcccattttgaactttgtgccagagaacacactcagcgaattcttccgctggtgcagcaagttttaaccgaatcccacctgacgttaactcagttggacgcgctggcctttgggcgcgggccgggcagttttaccggtgtgcgtattggcatcggcatcgggcaaggattggcgttgggtgccaatttgccgatgattggcgtttccacgttgcaaaccatggcgcagggtgcatttcgtctgatcggcgcaactcgcgtattagctgcaattgatgcacgtatgggcgaagtgtattggggacagtttgaacgccagactgacggtagctggctgggcgaagaaaccgaagcggtactgactccggcgcaagtacaagagatgacgcaggatttaagtggcaattgggcctttgttggcaccggttggcagacttatcccgatctggtcgcgagtcatgcggctatactgactgatgggcaaatgttgttgccgcaggcggaggatatgctgcctctggcgatccaactgtggaacaacggtgcggccttaccggttgaacaggctgaaccggtttacctgcgtaatgaagtgacctggaaaaagttacctggacgataaaatatggcaacttgtctctgaatttatggtcttaaagtttaagattaattaaggagataacggcgatgacacccagtgaattaaggcgtaaatggcttttcgggctagtaggactgagtgccttactcttgactggttgcgtaaccattcccgatgccataaaaggcaccacggctacgccacagcaaaaccttaatgcggtacgtaatgcgccgcaggtttttgccggtcaggaggcgcgttttggcggcacggtcgtcaatgtggttaacgaaaaacaacgcactcgtctggagattgccagcgtgccgttggattcaggcgccagacctattctcggtgaaccgtctcaagggcgagtgattgcctatgtggatggtttcctcgatccggtagatttccgtggtcatctggtgacggtcgtcgggccaattgtcggcagcgaggcgggcaaaattggtatgacgccctataacttcgtggtaattaacgccaccggttataagcgctggaatattgcccagcaggtgatgatgccaccagcgccaatggggccttggggcttccgcggtcatcctgggtgggggccaggctggggttggtatgataccgggccagcgcagattcagactattgtaactgaatagcgttgctgaaacggtaggccagttagccagccgttgccaatataataatatagagaagggtgttgagcgatcgacacctttttttattgttttaatccgacaattagggcgctaaatcatcctctgctcggataactccccgttactgccccacatatttgactgttatctcgcgagagtgaacgctgttaggttcaaaaaatgaccctgattcaggggatagggcgcatcattgccacccggtcagccatgccgctcgcgacttcttccgtcagtattttcgtcagccaaggcggcgtattacgtgaattcaggcgaataaaaccgaatttggtatagagcgcaacgctttgagcaaaacggctaaaggtcgtcagatacagcgcggtagcgccgcgatctcgcagacgatcaatgactgccgccaataattggctgccaataccttgtccaccgtgctggggtacaacatcaatttcccccagtaaagccctctgatccacccagtacactaaagcgaaacccacgggagtcccgcttctgtctttcgctatccacaggcgtttttctcgctgcgctgtcactaattcaatcagcggcagcgtttctgtttttagatcatcaggcaacaagtgtgcagggaaaagttcggctgcctgttgctcaatacttgccaaaaacggcagatgttgctttttagcagactcaatctgatattcggtcattgtatccactcgttaacattagagtgatagcttaaccgccaatgaagagtcgcataaggtttttttgataaatggataaaaactatgtgtgctatttaatcgatttgttgaaattatcaccgggtaatcatttccagctcagctttagattataaactgacttaaacggtgtataatcaaagagttacaatcattataattatgaatttatataacgcattgattttatttatattaatgaggcggcgatggccgccttgtttttttgttgagatacatgaaaaaaattagtgatgtacttctcaacctcaaaattgtttaaaagcaaactggtacgctgagttaaaatattgttaaagtcctgaggtggatttgggtgaagatatgataatcaacaatgatttcaggagtgctaccttggaaaaagcatggctaaaacgttacccggcggatgttccagcggaaattgatccggatcgttactcttctctggtggaaatgtttgagaatgcggcgctgcgttatgcggatcagcctgcatttatcaacatgggtgaagtcatgactttccgtaaattggaagagcgtagccgcgcttttgctgcctatttgcaaaatggtttggggttgaagaagggcgaccgcgtggcgttgatgatgccgaacctgttgcagtatcccatagctttgtttggtattttacgggctggaatggtggtggtgaacgtcaatccgctgtacacgccccgcgagctggaacaccaactgaacgacagcggcgcagcagcaatcgtgattgtttccaattttgctcatacattggaaaaagttgtcttcaacacacagattaaacacgttattttgacccgcatgggcgatcagctttccgcagcgaaaggcacattggtcaactttgtggtgaaatatatcaagcgtttggtgccgaaatatcacttacctgacgccatttctttccgtaccgtattgcaaaaaggccgtcgcctgcaatatgtcaaaccggacgtgctcaataccgatttggctttcctgcaatacactggtggcactaccggcgtggctaaaggcgcgatgctaacccaccggaatatgcaatctaaccttgaacaggctaaagcggcctatgcgccgttgctacagcctgggcaagatttagtggtaacggcgttgccgctgtaccacatctttgctctgacgatgaactgcctgctatttatcgagctgggcgggcgcagcctgttaatcaccaatcctcgagatattccgggaacggtgaaagagctcagccgttatccctttaccgcgatgaccggggtgaataccttgtttaacgcgttactgaataacgaagaattcaacaaacttgatttttccactttgcgactttctgtcggaggggggatgccggtacagaaagccgttgcggaaaaatgggaaaaactgacgggcaggcacttgctggagggctacggcctgacggagtgttcacctttggtcacaggtaatccctatgatttaaaacattacagtggcagtattggtctgccggtgccttctaccgatgttcgcctgattgatgataacgggcaggatgttgaaaccggtatgccgggggaactatgggtgcgcgggccgcaagttatgttaggctactggcagcggccggaagccactgacgaagtcttaaaagacggttggttggccaccggagatattgccactatcgatgatatcggcttcttgcgtattgtcgatcgtaaaaaagatatgattctggtttctggattcaacgtttatcctaatgaaatcgaagatgtggtagcgttgcaccctaaagtgctggagtctgcggtgatcggtgtgcctaatgaggtttccggcgaaacggtgaaagttttcgtggtaagaaaagacccgtctctgagccgagacgaattgctgacccattgccgccgctatcttaccggttataaagtaccgaaaattgtcgagttccgtgacgaattgccgaaatcaaacgtaggcaaaatattgcgcagagaactgcgtgatgaacctgttaaggagagtagcaaaaacgctgcttaataggcttcgttacaggctcatcatcaacaacgccggtcaataccggcgttgttgtgtctgtcataggctaacgaccaagagaatgatgttttgaattatcagttgatcactaccgacgctgcgttgcagcaagtctgcgagcaagctcgtaaccatacccaggtggctttggatacagaatttgtcagaacgcgtacctactatcctcagttgggcctgattcaactgtttgacggtgaacaactttcactgatcgaccctttgccgatcaccgaatggcagccctttcgcgagttgctgaaagacgagtcggtggtgaagtttctgcacgcgggcagtgaagatcttgaagtctttcttaatgcatttcagcaattacctacgccaatgattgatactcaggtattagctgcctttacgggtaaaacgctttcctgcggttttgcgacgctggtggcagaactggaaggcgtcgaattggataaaagtgagtcccgcaccgattggctggctcgtccattaactgagaaacagtgcgattatgcggcggccgatgttttctatctattgcctatggcaaaaaagctggtggatgccacactggcggcggggcgtatggatgccgcgcaggacgaatgcctgctgctgtgtcgccgtcgcagtgaaacggtagatcctgagctggcttatcgtgagataactaacgcctggcagttacgaggtcgtcagttggcatgtttgcaaaaactggcgtcgtggcgtttacgtcaggcgcgcgagcgtgatttggcggtcaactttgtggtcagagaggaaaatctgtggcaggttgctcgctatcaacctacgtcactcggtgaactggattctctgggcttaagcggtcaggaaattcgctaccacgggcgcactttgctggcgctggtggctgaaggtaatgcagtgccggaagatcagttgccacctttggtcgccaaccttatcgaccagccgggttacaaaaaagtctttaaagatattaaagcattgattcaggcagtgagcgagcgcagtggattaagcagtgagcttttggcttcacgtcggcaaattaatcagttattgaattggcattggaaactcaagccgattgaaattcgtcctgagttattagccggatggcgcggtgatttgttaggtagtgaattggaagaaatacttaaacagtattaatcctatttaagggcaggggaactctcttctgctctgaatattttatacgcggtaggattttatttatttagcggtatcaataatccatcaagctattaagacttttttttgccagaaatgacgaaactcatttccgcagtaacttcttttcactgtgtttatatacagccaggaaaactcaattaccccctgtaaataaatacagggggtaattaatgcgacgatgtcatttaggtgtttcttccgtttccggtaatgtcacgttaagttctaacaccgaaatatcgtcacctttctgctcaaactgaacgtgtagcatttccggatcgatctgaatatatttacaaatcaccgccaatatatcgcgcttaagatcaggcaaataatggggctcactgtccccacgacgacgctcagcgacgataatttgcagccgttccttggctatattggctgtcggttttttgcgggacagaaaaaagtctaacaaggccatggtttatcccccaaaaaggcgtttcaggaagcccttcttctcttcttcaatgaagcggaatgggcgttcttctcctagtaaacgatcaacggtatcgtcatatgctttacccgcatctgactctttatccagaataaccggctcgccttggttagaagcgcgcaatacggattggtcttctgggataacgccaaccagcgggatcctaaggatttccaggacgtcctccatgctcagcatgtcaccgcgactcacccggcctgggttataacgggtcagcagcaggtgttctttaatcggctcttcgccacgttcggcacgacgagattttgaggataaaatacccaaaatacggtcggaatcgcgaacggaagagacttccgggttagtggtaatgactgcttcatcggcaaagtaaagggccattaacgccccgctttcgataccggcaggagaatcacaaaccacaaagtcaaaattcatatcgccaaggtcgttcaggattttctcaacgccttcaacggtcagagcatctttatcacgagtttgtgatgcgggtagaatatagagattatccgtgcgtttatcttttatcagcgcctgattcagggtggcatcaccttgaatgacgttaacaaaatcataaacaactcgacgctcacatcccataatcaaatcaaggttacgcaggccgatatcaaaatcgatgaccacggttttcttacctttttgggccaagccggtcgcaatggccgcacttgaagtggtcttgccaacgccccctttacccgatgtaacaacaataatgcgtgccatgaaatggattccttgttaaaagggcttaatttagaggttgtatggttaaagcattatccaacagatgaagacgtgcggcctggccaaaataatcgcttggaatctggtcacttaaccaatattgccctgcaatagagactagctcagcgctcagatgtgtgcaaaaaatctgacactgagcatcgccagaagcgccagctaaagcacgccctcgcatcattccatagatatgaatattgccgtctgcaataagttctgcaccggcactgacactgctgataacaatcaaatcacaattacgggcataaatctgttggccggaacggacaggagtattaatgatacgcgtcttaacgggggcattttccggtgggcttactggctcgggagccatcttttggcctttaccttcattcagtaatggcaaacccgctcgagcaatcgcacgtttttgtcgttcatcccgacagccgctgacgccaacaatacgaaggcccgctgaagtgacagcctgctgaacatctctgaagttagcatcgttaggtaacgtagcaacattaagaacaacaggggcgtttttcagaaaagcgggagcttgttccactttttcctgcaaagcctgacgaattacctccggctgtgcatgatgtaaatgcactaccgatagggtaaaactactgccttttaactcaattggcgattgtgacatctatcctgactcagtttcagctacgttaaatccccggaataccattcggggtacgatattccgatgtacctatgcatgttataggtaatataaagataaatctatccgtatcaatatatcgaaacccttcagcaacatttattaaaattcgattggaaattacagcacaactttggcgtattcgctagcccacctcggctatatatctctgttactggtcgttttatgtgataattgatccggtaccaaatcaaattcaccggtgtttgtcttgtatgtaaaatagacagaaagtaatgtggctgagtcagttctgtctatttatcccattgatgttttttcaatagaagtttttccggttgtattttagtgataataaaatcttcaattcatataatttcagatcaatctgagcatttattgtcagccttgagtccaatagcgagttaattgggcgaattatctgcgataaagatcacagttcgccgacgtagatctcggacgtggtgatggagcgggtttggggaaatgaaactgccgtgactgatagcgagtttagtgctggcaggcatggcgcttctccgccttttccactttagatgaagcagtgcgcccactaaagatagcgacgagatccctattatttaaggattagtgagtaatagccggtaatagagagtggtagtcttgaaattatcaccacgcgttggattaggagagaataatgaagggaatctatctttacttaattctgttcagcggagtcgcttatatccctgttaatgccaatgtgagtgatttggcaagctacgagcggggattacaactcttgggcgaatgggagggggacagagaaaggggtatcggcgctttctctgcgatgactctcccttcattgaagacggttgcccggtggatgcgggattgccactacaacataatggaacagaaaaatcgtttcttataacaattgaaacccgtctatgtagccataggctgagttcggtgacgtttaattatctgggaatattgccaattttcagcaacccaatgtggttatccaccgtgtaaaaaagcaacggcaaccctgatttgacggccgctggctcaagggctaaagtcactttttctgatacaggcgtggtatagtccacggcttatacaggacgttattgaccacttgagtagagctaaaaacatgcattgtgtgatttatcgaagccctaaacgggatcaaacttacctctatattgaaaaaaaagacgatttctcccgggttcctcctgaattactggccagctttggtcaaccccagttttccatgatgttgtctctttcagagcgaaaaaaattggctaccgcagatattgagaaagtaaaaactgcgttgattgagcagggtttctatctgcaagttccgccaccgccagaaagcctgctaaaaatgcatttagggacggataaagcctaattctccaccccgatgagaagcccggatgccagcctttgctgcgccgggtatttcgcaggttttttccccctatcggattaaattgattggctgcctcaaagtattgccagtaaataaccaaaggaagtgggtgatgagggtttcgttactgacaatgttgttcgcttcggccgttttgagtggcgggttacattcggctacagctgctccggcagtgacgccagattcggcgaaggtcgcaaataggtcgacaaccgtcaccacgccggcgcagcaaggccgcgatcccgctgaattccacgcttatgtcgaacaacttaaaatccaggctcgctcacagggaatcactcaggcgaccttagatcaggcgtttgctgacattcattttgttgaccgagtgatcaaatccgatcgcaatcagttagaaaagaaagtgacgttggatgattatctacagcggacattgcccgcgcagaaaatcaaacagggaaaactgtttcatcgccgttataaacctcagttagcccgagctagcgcccgctacggagtacctgagcgctatattgtggcgctatggggaatggaaagtggcttcggtaaaattcaggggaaagaggatgtcatttcggcgctagctacactcgcttttgaagggcggcgcgaagcattttttaccaaggaactcatggctgccctgaatattattcagcaagggcatgtcggtaaccaaaagctaaaaggttcctgggccggagccatggggcagaatcagtttatgccatcctctttcctgaattatgcggttgatggcgacgatgacggaaagatcgatatttggaccaacgtcgatgatgtttttgcctcaacggccaattatctgtctaaagaaggctggaaaacaggggaaagctgggggcgggaggttctgttgccggcgaatttcaaatcgcaatatgtgggtttgaaaaatgagcaggtgcgcactttggctgagtggcagcgaatgggcgtattaccgctgaataaaaaggcgttcagttatcctgcattacgagcctgggttattacaccagataatatgcaaggtcgaacattcctagtttatgataactttagaactatcatgcattggaatcgctcttactatttcgcactcagtataggtatgatggctgatggtattgtacgttagcagagcgaaatattgatgacccgattgggattaactgtcgatgtactctagagtttatctgtagatgatttcaggagaagcaacatgtatcaacatagagactggcagggagccttacttgatttcccggtaaataaagtggtgtgcgtcggcagcaattatgcagatcatattaaagaaatgggcagcgcagtacccgttgagccagtgttgtttattaaacctgaaaccgcgctgtgcgatattcgtcaaccggttgctattccaaaagggttgggcggcgttcatcacgaagtggaattggcggtattaattggaaccccactaaaacaggccaatgaagatcgggttgctcgcgcaatagccggttacggtgtagcgctggatttaacgctgcgtgacttgcaaatgggttttaaaaaagccggtcaaccgtgggagaaagccaaagcttttgacggttcttgccctatatccggttttattcctgtggcagagtttggtgacgcgcaacatgccgaactgtctttaatgatcaacggtgaagttcgccaacggggcaataccgaagatatgattacgccaattctgcctctgattagttatattacgcgtttctttaccctgcgagccggagatattgtgctgacgggaacgccgcagggcgtagggccgctaaattcaggggatatgttacaaattgctctgaatgataaaaggctaaacactcgtattatctaatgatttgctcgctgccccggcccgcttggggtggcgaggcttgcatcttcgctctaaagcgtctataacgacccgccatcacttacttacaccggataccgatatgtcacaacttcctttttggcaacaaaaaacgctggccgaaatgtcagacgcagaatgggaatctctgtgcgacggctgcggtcaatgttgtttaaacaaactgattgacgaagacaccgacgaaatatatttcactaatgttgcctgcaatcagctaaatatcaaaacctgtcaatgccgtaactatgagcgtcgctttgaatatgaagaagactgcatcaaattaacccgcgaaaatctggtgacctttgattggcttccgcatacctgcgcctatcgattggtgggtgagggcaaacaattacccgattggcatccgctattaaccggttccaaagccgcaatgcacggtgaacgtatttctgtacgccatattgccgtgcgtgaaagcgaagttatcgactggcaggaccatattttaaataagcctagctgggccaggtagtcaattgatgaaaagaattgttttcttttaaaaaaccgggtgcgccagtggtttattgtcattaaaatccaaggttattatcatatatagatctaggttatttcttcttgctgcgtagccatcgtgaggaggggggtagccttatcattgcttgttttcactcatcatttgaaatgcacttcttattggtctttattatatttatacaaaaataaaacttgcgtttgatattttcccattaaagtaacaatattcactttaagtttaagtttaagtttaagtttaagtttaagtttaagtttaagtttaagtttaagtttaagtttaagtttaaagcttaatgataaatttaatgtgagtacagcggtggttcatgattactgctcctgaggtgaaacggtatggtatgcctttcatgatgcaaagttcgaaaaatgaaaatattctaattggtgtggatcaagcggaaaatattgccagccagccagccagccagtgggttgagtaccaacacggcggccatcccggtgaagctgctaagggattttttctaacgttcaaactcaggctaatcaacttaagatcaaggtaataggtatttgggtaagaataaattaggagtaaatgtatgctccatagaacgagagtttttaaactgcaaggatctcgtcaggcatctttttctggtgttggtcacaatattttggggcaaatagcaaaggcggctttatctctctatcgtattgtgaaaccaccagtcggcaaggtcgatgctgacatataaaaatatgattcttatcaggcaataaaatgttatttaggggcgtaactatctactgattaattcatcgaatatcattcgcaactagtatttggtaaattttaaatgagattttttatttgtcactatatgtgagggtcagtaggttcaacacgattcaacaaatcaaacattgtttaattcgagaatattcccctgttatttctgtgtggaaaccgcaggggaagtcataatatcgttagctgctatttaagagttatactgggctaaaattattcgcgttgcttcagccagaacatcccgtcgtgattctgcatctttcttatgttgggtaaaatatactgcgagaattaacggtgctcccgttggcggccaaagtacggccacgtcattggttgtcccgtaatcaccgctgccggttttatcacccacgagccagtctgctggaacaccggcgcgaatgctggcatttcccgtagtatttccttttaaccattgagccaactgttgctgctgggctggcgctaatccatcgccgaactgtatttttttcactaacgccgccattgagcttggcgttgtggtatcacgaggatcaccaggaatagcgctgtttaattcaggttcccagcgatccagacgaaatgcagtatctccgaggctctgggtaaacttattcacaccttctaatccgccaagttgctgaattaataaattcgcagcagtgttatcgctatattgcagcgctgcggcgcaaagtgcagctatcgtcatgccttttcccaaattttcgcgagctatcggcgcataggaaagcaggtcggcctcagaatacgtgatatgtttttccagcaaagcaggttgagacatactttggcgcaatattgctgccgccagtaccagcttaaaggtgctacagaatgggaaagcttcattgccacgatattgaagttctttaccgctttggatattaatcagcgaaacgcccaaacgaccttgagctttttcctcaagggctgtcaattgttcagataatggctggccggcagatttcgcccatgaggggaatgccagattggccaatggaagggtgatacctgcaagtagcagcgagcgccgcagcgttgaatgcttcatagtcgtctcttatgcaatgtgaatctggggttctgagcaataaactctgctcgtctctgtttgaccgcaaaatgagagcggctccgagttactcaagattcggtgaaataagagaacaaaaagaccaggattgccacggcgatcataatcatggttgtacgtctcattttagcgctccaatgtgttgttcaatctaaaggtgaatgaacatggcgactattctacgtctgcccaggtaaaaaccctagtccgttaggggagcgggaatcgacagcatcaggatattgatttaatgcaattaaaccagtgacattttttacctgcttgactggatatgacataatgcaggtaagattaaaatgataagttgaatgccatgaaaaaaaataaattagtgttgtttaccttcggattagcgatggtcataggtacattctctgcctcagtattggcatctccgctgatgcgtttacagtgtttaactgaatcggggttaaagtcagagagtttgctggatggccttaaccaacaactaaccattgacggtgctattttcaaattcaccgaaattaaaaatgacgccaatggcgaacgtctgctttttcaacgtactgttgataacagcacttttcacgctgcgttgaatatctccaccacgcctatttatctagatttgaacaacggtgagaaaacattgaatttcacctgtaaaagtcttaaggcctaagttttactgcaagtgataccgttagagtcttacgttttctctgtgtagaaagggtaagcagcccctgttccccatacaggggctgtcgttataacgattaataaacggtttgattccttccagcgtttttggccttatagagattattatctgcggcttttagtagcgaatctaatgttggtgtatccgtacttagctgttttagcccaaatgaaagggtgagtttaatattatccccgcttgctggagtgaaaattgtctcttcgacctctttcctgattttttcaattcgctgataagcgttctccacatgacagttgaaaaagaccatggcaaactcctcaccgccaatgcgtatcaccatatctgattttcggctattctttttgaacatattagccaactcgcaaagtataaagtcacccacaggatgcccgtaggtatcattgatcttcttaaaatgatcgatatcgccggcagccagagtaatgggtttgttcagcgagtggatgaccttccaatctttcgctaatttacgccgattgaataaatgtgttaacgggtctatattagcttctctaattgctctcttattggttataatctgtttgaatataatgaccaaataggtcagttgcagaagtaagctgaatccaagcccaaaacagaataatatcttggcgcttttatctacctccgagatggccattttcgcctcggataactgctcactgctgtatttcaagagtcgcatgtttcggagttcaaaatcgataaaatggctaagtgcatcgttgaaaagaatatttctcgcttcattaatatatccgttttgatacagcgaaactgctttttcacttaggctaatataacgcagccaggcatgatacgcctcgtcaagatcctgcctgttattgctctctggcaaggttttactatacatatagaaagtattttctattcttattattaactcatttgtttctttccgtacctcctcaacagctttatcatcgtgagcattaaccagttgaagctgcaactgccttaattgcacggtatcagtaataaagctcctgcaggccgtaagtgctggtatagttttatccgtcagttcggccgttctggcaccgaaccgggcggtatcttttagcaggttattacccatatagaggtaaagaatattcacaatcacaatgacaataaatacagatatggcgaccccatttttttttgaggcaagacatcttaatctcccagtgttttcctgtttataaagttgtcataacgcacttatatagcctggttagtcttactggtaggtaatggcagtttttttgtcgctgataatagttaaatagataagtttagtccaaaattttttacttcatttcatttttaacggaacttatattgacgggtaggttattaatgtacttgattctggctatttctctgagattggataattatagctattatgcaaataaaaaaaggtgcctttcagcacctttttaagattaggagtttgttatttatcggccaaacaggtcacgtcttttcggcttaacaaattgactaataagaaccagaatagcaaccacaaggtaggcggaaaatataacgactagccactgaggcatctcaagagataagaattgccactgtctcactgagcaatcgccactggccaggaatacagaaggcagccatttgtctagtggcaaccaagacgggaaattaacaaagaaatcgcaggtggcaaatggggaagggtgaagttggaacatggtatgttcccacgctaattgcacgcccttccaggcactgtatatccacaatgcaatcgctaaatagcgtaatggcgatttgggcgcaatagcgccaagcagcgaagcaccaagaataccaaacaacgcacagcgttcataaatgcacattacacatggctgtaatagcatgatgtgttgaaaatagagtgcggccagctcaagcagaagtgcagtcaaagccattaaaagccaagcaccgcgcccttgggagcaacggttaagaaattgcaacatatctttatattccatgcagtaagcaattgtagtggcagtgtaaaccaattcatcattgctgccagctatccggcgacaagtttaagcgaaaatcatctgtttatcgcttagaccacgatttaacggataaaaattcatctttgatgatgttaatggcattttaagccagccctttagtataaaagtgtagggctggctgaggtcagaatgcaaggaatcagtgtgtaaccagtgcgcctgggtcaatttgcggcacggctatcaggcccgattgaatcattaattcggtcataggaactaatgcaaactcaacgcatagaagaccaaccaacgtcatgacaatggtatagggcagtgccatatacaccattcttccgtaggataaacgaataagcggagccagcgcggaagtcagcaggaataagaatgcggcctgtccgttaggcgtagcaacggaaggtaaattggtgccggtattaatggccaccgccagtagttcgaactgctgtagggaaataacaccctgttcgaaggcgctacgagcctcgttaatataaacggtgccgacaaaaacattatcagatacggaagagagcaaaccgttaaacagataaaacagcgacagttgcgccgatggcgacgactgtaggacaaactggataatcggcgtaaacagatgctgttcaatgattaccgccaccacggcaaaaaataccgtcaataacgcggtaaaaggcaaggcttcctgaaatgctttgcccagtgcatgttcgttggtaacgccgcacaacgacgtggccagaataataacggacaatccaatcagacccacttcagccaaatgtaatgccaacgctacaaccaaccaaacgccaattaacgcctgaatgattaatttcattttttcctgacgcgtgcgtttggcggaggtttgctgatcgtattctttcaaaatctggcgcacacgatccggcaattctgcaccgtagccgaacagtttaaaacgctcaaccagcagacagaccaataaaccgcaaacaaatacaggcaaagtgaccggaagcatgcgaataaagaaatcgaagaaatgccagccagcgcttttggcaatgatcagattttgtggttcgccaaccatcgtcattacgccacccagcgcagtaccgacaccggcatgcatcatcaggctgcgtaaaaaggcgcggaactgctccagtgtcttacggttttcctgcgaatctatccagctgtcatcgttgacgtccttatcgctatgattggaggcaacgtggtgataaatagtataaaaaccgacggatacgctgataaccacggcgataaccgttagtgcatcgagaaatgcagagaggaaggcggaggccagacagaaagccaaagacagaatgattttcgaccgaatattcagcagcagcttggtaaagacaaataacagcagctgtttcataaaatagataccggccaccataaagattaatagcagcagcacttcgagattattagcaatttcctccgcaacctgatgcggactggtcatcccaataataattgcttgaatcgccaataaaccgccaggctgcaacgggtagcattttaacgccatcgctaaggtaaaaataaactcaacgaccagcatccatcccgcgacaaagggactgacgaagaaaaagacgagagggtttattatcagaaaaccgataatggctattttgtaccagtctggtgagttgcccagaaagttcttgattagagcctgtcgattggtcatatccattgtgtgtcattatccccttaatttttctatggttcagttaataatcaagcttacggcgtgctttgagcaagcgatttaaagagtgtaaaaatatgactagtagcgtgaagttggcgcgatttttgccattttatgaccgctttcaccaattgttctgctgcgacgctatatcatacacggcgcgtctggtatgataagctctattaaattgctgaaaaatatcgctacggaacgtcacacacatggttataaaggcgcaaagtcctgccggtttcgcggaagagtacattattgaaagtatttggaataatcgcttccctccaggatctattttgcccgcggagcgtgaactttcagaactcatcggggtaaccagaacgaccttgcgggaagtattgcaacgtcttgctcgcgatggctggctcaccattcagcatggtaagcctacaaaagtaaacaatttttgggagacgtcgggccttaatattcttgaaacactggctcgcctggaccacgatagcgtccctcaattgatagataatttactcgctgttcgaaccaatatcgcttcgatttttgtgcggactgcgttccgccaacatcccgatcaagcattggatatactggcgaaagcgtcagaggtagaagatcacgcagaagctttcactgctttggactacggcattttccgcggtctggcatttgcttccggtaatccgatttacgggctaatcctgaacggactaaaaggtctttatactcgcgttggtcgttattatttctctaacccggaagcccgtaagctagcgctgaacttttatagccagttagctagcctgtgcgaaaataaatcatacgaccaggttatggaatgtttgcgtaactacgggaaagaaagcggggcgatctggcacagtatgcaaggcacaatgccgagcgatctggctgaagcgcgccgctagaacggcaaatgacaatgaaaaagggccattaggccctttttactatctgataaacggtattctcgataaaaccgcatcagacgaaggcaaaggttacaatttgctttcacgtggtggcgtgctttccagcagttcggtgctgccatcctcattcaactgttcaatgtgtacgtcaaatccccagaggcgatggatatgtttcatcacttctcgacgacttttatccagcggagctcgatcctgcggaatatagcgtaaggtcagtgagcggtcgccgcgcaaattgacattccaaacctgaatatttggttcatggttactcagattgtattgagcagacagctcattgcgaatagcccgataaccctcttcattatgaatcgccgagatttccagataattatttttatcgtcatccagtacggtaaataaacgaaaatcgcgcatgactttgggcgacaaaaactggctaataaaactttcgtctttaaaatcacgcatggcgaaatgtaacgtatctaaccaatcagaaccggcaatacccgggaaccagtagcgatcttcttccgttggcgacatacagatgcgcttgatgtcctgaaacatggcaaaacccagcgcataagggtttatcccactgtaataagggctgttataggcgggttggtacaccacgttggtatgactgtgcaggaattccatcataaaccgatcgctgacccgaccttcgtcatacaggtggtttaaaatagtgtaatgccagaaagtggcccaaccttcattcatcacctgagtctgtttttgcggataaaaatattggctgattttgcgtacgatgcgcaggatttcccgctgccaggactccagtaatggggcatttttctccataaaatagagaatattttcctggggttcacttggatagcgtagcgcttcagcctgggtttcttctcgagcaatgcgcggcagggttttccatagggagttgacctggctttgcagatattcctcccgacttttctgccgagctttttcttcctgtagcgaaattttttgcgggcgtttataacggtcaacgccgtagttcatcagcgcatggcaggaatcgagcagtcgttccacttcttctacaccgtagcgttcttcacattcactgatgtaatggcgggcaaacagcaggtaatcgacaatggagctggcgtcagtccaggttcggaaaagatagttatttttaaagaaggaattatgcccatagcacgcgtgagccatgaccagtgcctgcatcgtaatggtgttttcttccatcagataggcgatgcaagggttggagttaatcactatttcataggccagaccctgctggccttgtttatatttctgttccgtttcgataaattttttgccaaacgaccaatgggtataatttattggcataccaatacttgaataagcatccatcatttgctcagaggtgatcacctcgatttgatgcggataggtatccaatcgataatgtttggcgacccgatcgatctgatcgaggtaaacctgtagtaattcgaaagtccagtctggtccgtcagtcagacgcttatcttgcgcgcccgttttttcagttgaagttgtcatcagcgcaccctcacggttttaacatctggccaaatacctgtcccttgcataatcctagctcaatctgaacaaactgaagcacggcaagaccttatgtcaatatagtttatttttgccgcgctgggagcatcatcttattcttctatttggcaatattttattctgcattaatggcaatttataagaattaaatatcgtcaaagtcatcttggtcaagttgtggattatttggactataaacagctaacttaatgaatttattgagatatatacctgtttatgatgttcaaaccgaatcttatcgccaataatgtaaatcacttgaaaaacaataagattaaaatataaaataactgtgagcagaatcacaacccacgatcaaattgttggctagttttttacactaagttaattttctgtcagcagaatattatgctttatgtattatcggcggagttaaggtatgcgtattatcattttgggaagtggagtggtgggggtggccagcgcctggtacctggcaaaagcaggcaatgaggtaacggtcattgaccgccaatctggcccggctcaggaaaccagcgcaggtaacgcggggcaaatttcccccggctatgccgcgccttgggcagctccgggcgtaccgttgaaagccattaaatggatgttccaacgccatgctccgctggccatccgattagatggcagcagcttccagttacgctggatgtggcagatgctgaaaaattgtagtacttcccattatatgaccaataaaagccgcatggttcggctggccgaatacagtcgggattgcctgaaagatctgcgcgaagataccggaatccaatacgaaggccgtcagggtggaaccttgcaattgttccggactcagcaacagtttgataatgctgcaaaagatatggcggtattggaggatgcgggcgtaccttatcaattattaaccgctgataaattagcgaccatagagccagccttgtccaaagtgtctcataaactgaccggcggattacgtttacctaacgacgaaaccggcgattgccgtttatttaccgagcaattggcgaaaatggctgaagccgccggagtgaaatttatttttaaccgctcggtagataaattgctggtggacggtaatcaaatcgctggtgtactttgcggcaatgacgtgatcaagggagatgcttatgtcgtggcatttggctcttattccacgtcattactacagggtttagtgtctattccggtatatccgctaaagggttactcgctgactattccaattaccgatccggattctgcgccattttctaccgtgttggatgaaacttataagattgcaattacccgatttgacgatcgtattcgcgtcggtggtatggcggagattgtgggttttaatacccaattggaacaggcccgtcgggaaacgctggaaatggtggtgcaggatttgtatccggatgggggcaaagttgaacacgccacattctggaccgggttgcgtccaatgacgcctgacggtacgccggtggtagggcggacgacgctgaaaaatctctatctgaataccggccacggcactctgggctggacaatggcctgcggctcagggcaactactggccgatatcatttctggccgtcagaccgccattgacgccgatgatttagcggttgctcgttatagtccgggattccattccgcgaatcatggcagtctgtacgcggcgcgttcgattcgctaattttcaaatattgcacaacaagcggctgggtaatatcggcctcttgatgtgcgcgttatttcatagaataaataatccggtaacaattaaaagcccgacaaacccggtaaagtaaaaaggaacgcgcatgcctcgcccgatatctgccacgctgcatttgtctgcctttgataataatcttaatgtcatcagaaattgtgctcctcagtcaaaagtatggtcagtggttaaagccaatgcttacggtcacggcctgagcagagtgtgggaaagtttatccgctaccgatgggtttgcattattggatctcaatgaagcagtcttactgcgtgagaagggttggaaagggccaattctattgctggaagggttctttcaaccgcaggatttgacgttgttggatcattatcgtctgacgacgacgatacacagtgattggcaattagacgctattcaacgagcgcggttaagtgcaccacttaatgtttatcttaaactgaacagcggaatgaaccgcttaggttttccggttcgtcaggctgagacggtctggcaatgggcgaaaagcattgccaatatcgatcaaattacgttaatgagtcattttgctaatgcggataatcctaccggcgtggcgcagcagtttaatgacatcagcgatgccagtgccaatattcctgctccgcgcagttttgccaattccgccgcgacgctttggcacagtcaaactcatcgagattgggtacggccgggtattattttatacggggcgtccccgagtggtaggacggcagatattgcggacaccggtttgcaaccgacaatgagtttgtgtagtgaaatcatcgccgttcaggatttgagcaagggccatggcgtgggctatggcagccgctatcaggccagcgatgctcagcgtattggcgtcgtggcttgcggctatgccgacggctatccgcgtcatgcgccaacgggtactccggcatgggttgagggcgttatgactcgaaccttgggcactatatcaatggatatgatgatggtggatttaaccctttgtccacaggccgtaacaggtagcaaggttgaattgtgggggaaaaatctgccgattgacgacgttgccgccgctgcgggaaccgtgggctacgaattgatgtgcgctttggctcccagagtgccggtgaaaatcgagagttaagcttgaaaattccgatattccgaaacctatcctgaaggcgtatctttatccagatatgccttctttattttgatctcatttcattaatttgttgatatggcgacatgtgaatagtggttataaaacccatttatatcgttattctcccttcggtttttattattgccacctcatctgatttatttatagtggttgaactgctgatcatccgcatgattttatattctgagaataaatgaaatcgaataggagagtattatgtcagttgccagaatagattcactccagttgagaatgaatcagacaagaatactcatcctgtcattaatatctatctctcagctcatgctttgtctgtattcaatattatcactgcggtagcatcggggtttgattgtttattttcaatactagggaaaactattgttgatcaatattatcgacgatctttctatcggctaaccgagacagttttagcgaggaaatatgatgcgccaactcgtgggtctgattacctctgatttatcccgtatggcgcacagccgcgcatgggaaacgctggagcgtaacatggcagccgatgattttcggctggatagcaaggtgaaaaataccaaagaaacctccggtgagttgatgattatcagaacgggtgccgaagccattgtatttccctctggcgttaatgtattaattgaaaatgcagattatctattttattgcttgctccatccgataactcagctatggatgaaaaacaggcggcctgacggttacgatctcaatgttctgtataataatagccaatcccgctatatcatttatatgcagatgaccgaagccatgttgtattacgtacgccgggggtatcgggtcttggttatctatcattgcgatccaaaggccaccgatccagcagtccagtgcgctatttcactggcgcgacgggagcggcatcgagttacgttgcggactatcggtggtgtaatagagccaaaccaggaagaacagcaatatcgggcgggtctcatatccgcgtcagataaccgcgggtttatctatgcgctattcactcgtaagaaagtcatgatggctgttatccattacctattaaataggtctcagccaaactgcgacagaataatctcagtcttggcggattattgcatcgactggaatcgctttattccagatatcgatcatcagattgatacttatttatatccgtggaatggcgtttattgcagtgaagcgccccgaactctattttgcctgctggcttcggttggtacgaataaaggttgtctattagagattaacgggcaccgagttcgtcatttacgttatcgcttcgggacgttgagttgggctgcgggagcagaaaatcctcatcatggctatttgcattttgactggcaggcacaggggcggaggatagtaggatactgttggagaacgggacaacgcagcctagagggtcaacgtattgtcgctttttctgccactctggagggacaggaaaaagtcgaagcaattttatcctgcgaaggacattgtcgcgaaatcattcgaaaattttcaagtggagaaaatgagcctagatttgatttgcctgactgggcgcaggaatttgtgcaaccaatgatacaaccgcgtccccaaggtggggaaagggtgttttgtcattattggcggaaagcagccttggcaaggctggcactgaggttattacaaagtaagtgctaacgtaggataaacattagggcagagtaaaataacggctgatttagcgggttatcaatgatcctctaagattaattatccataccatttattacccgacgagttcacgtcatccaactcattccgcgaaagcggatcgacagagcgatccgcaatcattatcaggcaattttcttgatgatggtcggcatccgcttgctggcactgcgggcaatccacgccaataaacagccggttaacatcaccaacgccagcgaaagcttaggctgaatgggtaatgacatagcgatcagacccaaggcggcaccgccggccatttgcacaaaaccgaccagagcagaggccacaccggcttcattggcgtaaggttccaaggcatagctggtcgccgggcccatcataaaggccagaccggcgcaggcactggcgaccggcaacatgtaagtcggccagctattctgcatttctgcacttaattgtgttaagccaaataataagcctacacaccccaaagccatgagcagactaccggtcatcagacaggctggacggcccactttttgaatgatcctattggcaaagaaactcacaaacataatccagaacccgttggcgccgaaagccagtgagaactggagcggtgtgagattagcctcgcccatcaatacgttaggagccagagacacataagtcagcgccattcccatcgcacccgcgttcaccagcgcaaagaccagaaaacgatcgtcacgcaaaatacgcaaatagtttttgaacggtaagcctttaaccgactgggttcccgctgggcgggtctctggtaggaaaaataccaccaatatcagtaccagaacggcgtatagcaccaagaaccagaagggggcgcgccagccgaaggcttcggctaacaggccgcctaacaaaggcgccagcgcagggacgatattcaaggtgccatttaaaaaaccaaaggctcgggcggcctcgttaccatttaaacgatcgcgcacgccgctaaatgccaccacggcggtgcaacatacggcggttccctgtagcaggcgcgaggcgacaaacatcgttggcgtagtcgctagcgctgccattgcggcacccagcatatacagcagaattccgatgatggcgataggtttgcggccatatttatccaccaatggacctgcgatcagttgcccgacgcccaaaaccagaataaacagcgctatggtggattgaattagtgattcgctgctattcaggcctttggcaatagcgggaatagtgggcaggtaaaggtcgatacccagtgggcctaatagaatcaggctgagtaataaaaacagaaatttttgcatagcagagataaaacgtccaggtgacagaagcggcaagaaacaggaatttggctgagaaagggggctacgtttcggcaacggcgtcacttgtctcagaaaaactcaacctggttagattactacaatcaatgaaatataacctgcaaatagttttaattgcacggtaattctggggaagcggtgcggggaaggattaccgcaccggattgataactctccttttatctacaaaccccgagattagctgatccaattaataacacttggcggggttacgatagcttaaccgaggatatcaccacaggttattttttgtactcacttatgattcgtagcatgtcacggtcggggagcaacttggggtctggatattgccgccaggcgtgcgtaccgccaaaggagcatcgcgggcgcgagtggttaaattgcgattgcggcagcaggtgccatttgccgtctattttaactctcggctgcttgccaggaatgtcataggcggggcgtgtatcgcagtttgcgtgtagcgtatcgtcgacgggcgcttgcatggccatatggctgatgcgatagcatttttcctgattaatcgcgacgcctcgacgttccacttcggcggttaagcgtaatacggatttaccgtcgttattataagtacccagcgcggagcataatgcatctgaatcaaattcagcgatctgtttgtcggtcaaatgaggaaggggaagtgagcaacccgaaatgaataaaaaagccagcggtaatacaactctcatgaaaaatcctgttccataagtcactacaaaaaatagtggtaaataatttcaatactaattaatagtccatttagaattaaccgtattgaaaagtgaggggctagtgtaagtgataataagcagatttattatattaattgccaatttagataaataaaggataaacagaggaaattaatttatggtagtggagtgagttaacccgcgttaggctgatgagtaaccccatcagcttgacgcgtgagcaatgacccattgttccatggcggaagcatccagcggttcggaaaacagatatccctgcccgatgagataaccctgacggctgagcaagttgcgttgcgcttcggtttccacgccttctaccacgacggagagttgcaggctttcaccaatgcggattaccgcttcgctaagcgttctgctggtttcatcgtgctccagatcgtttacgaaactcttatccagcttgatttcatctaattccagtcgacgtagatagctcaggctggaatagccggtgccaaagtcatccattgataacctgacgccctgcttatggatcttatgaagggtggcaaaaatactgggattattatcaatcagaatatcttcggtaatttccaaagttaaatcctgcggtggcagatggtagcgttgcagaatgtgggcgatgatatccggcagccctaaattatggaaattggttggtgataaattaacggaaatagacggtacatcaaggccacgcaggcgccattccgccaactgacgacaggcttcattaatagtccacagcgcgagttcattaattaacccgcattcttcggccaatggaataaaacgctgcggcgggatctccccaagcgttggatgatgccatcggcttaaggcttctacgccgtaaagttgactatcgtgaagtctgacctgtggctgataatagagctgcagggtattgagatgaaccgcttgacgcagcgcgccttccagcgcctgacgctgtaaatttagctggttcatttctctgctgaagaactggaactgtccacggcccatctctttagccttgtgcttggcagcatctgcattgtgcagcagcgtattgatttctttgccattatctggatacaggctaatacctattccggcagaaggaataatggtcaccccggcaatctggcagggctgtgacaggcaacccagcagtttctcgactcgtagcgtggttttatcaacgtcaaaagaggttagaatcaggacgaactcgtcccccgataaacggccaataatatcgtgtttggccatatccccgcgtaatcgttgggcaatggtacacagcaattcatctcccgcagcctgacccaatgaatcgtttacctgcttaaagcggtcgatatcaatcactaatacgaccagcgattgcccttgcgcttcagcttgactaattgcctgatgagcatggttgaggaactgggcgcgattaggcaggccggtcagtgagtcatacagcgccagttgctggattttcatccgtgactgttttctttccagcgccagcgcgcacaggttagtggacagtttgactaacttatggtggaaggcgttagggccgcgtttttcgcgaaagtagaaggcaaaagttcccagcacttctccctggctggataaaatagggctagaccaacaggctaataatccgagtggcagcaaaatatgacggaggcgacgacacaaagggtcgttggcgatatcgtccactaataccggttctttgcgataggctgcagtaccacaagagccgctgtgcgggccgatgggcacccgttgcagtgcgtcggtgtagtgtggtgacaaactgggagccgccaaatgctgtaaggtattatcatcccgcgcctgaagaatactcaccacgacttccggcgcaatgcgttcaatctcgagacaaaacatattcagcacttcatccagcgggcgctctaacactaaggattccaataccttatattgtagtacttcatatattttggtcggggtaatatccgtcagtacgccaatggtataactggctttcccctgttcgtcatagaccgaatttatggttgccgagcaccaatgaggctggccgtcctgactataaaacagttcttccggctgcaacgtttggtgaaggtcgtcggacgaagccgatatcgatgaggaaggcggtttattttgtaatagggcagcaatcggttgccccagtgcctgctgtgcgctgtaaccgaatagtttggtaaaaccctgattaatatacaaggttagctgaccgtcatcgctgccaccggcaataaacattgcgctatcgctgcggtcggtcagttcggtcagcagctgtacccattcatgggttgaggattccagcgccacctgctgagtgatatttttggcgattttgaccattttggcggttttaccgtcgcgacccggaaccggctgataaatcgcggcgagccataccggggagccgtctttatgtcgccgctcaaagcgaccttccagagactggccagcgcgcaggcttttacgcagggcgtgatactctttgctcccgataaaatcgggcttacagaacattttatgggactgtccgatgacttcgtcacgctgataaccaaagtaatcaaggtagttctggttaacattgactaccacgccgttaagatcgaattcgataatagccagagaaagatttaatgcttgcaacagcgcctcatgttcactgtacgcagacagatctttttcagtggggaaagggtcatttaaatggctcatgaggattcctgtagcaatagaagcgcctaggccgttgtatcattaaactaaaatcatcggatatgtaaatcaaatatcactatctatatagaaacagaataggataactgacaaagaaattaaatataataaagtcatttccccaaagaacagactttgtacaacgacaagtagatttttttaaatctgtttagcgtgtatttaacctaccttaggagagaaaccccatggtcataaagagtaaatatagtgcaatatttataaattaattagagtttttaatgcgtattcaatctgtcgctttttatcgactaattaaaagttaaatgaatgcttgttgtcgacagctaataacgcagaaaaaccggctaaaaagataaccattgtttgtaactcattaaattattgagtttttattacgttgatggaaagaataagccccgccagcgctaaaaaggccggcggggctgagatatcggccatcaaagattttaatggtcgatagagctgaaacgtccgccattaaaatctttaatggcatttttgatttcctgctcgctgttcataacaaaaggcccgtaaccgacaataggttcattgatcggttcgccgctgagcaataccaagacggcattattgttggcttcaatggtcagatggctgcccgctgaatccagcaagaccatttccgcttcgcgaccaatgctttcgccattcaccataatggtgccgtgcaagacgatcagtgcggtattccagccttccggcagagaaatttcactgacgctgccctgattcaaccgcatatcccaaacgttcagcggtgaaaaggttttggcaggcccggtatggccgtcgaactcaccggctatgacccgaacacgaccggcgttatccggcagttcaacgcgcggaatatcctgactcaggatcgcctgatatccaggtgcggccattttatctttggcaggcaggttcacccacagctgaaccatttccagcgggccaccgcttttactgaaggcttcggagtgaaactcttcgtgtaaaataccagagcctgcggtcatccattgcacatcgccgggcccgataacgccgcctttaccggttgagtcacgatgttggacttcaccttgatacacaatggtgacggtttcaaaaccgcgatgcggatgttgccctacgccacgcgggtgattgctcggtttaaaatcctgcggaccggcataatccagcagcaagaacggactcagctgcttgccatggctttgatacgaaaacagagaacgaaccgggaaaccgtccccaacccagtgggaacgtggcgcagtgtaaacacctagtacttttttcatcataatctccttacaacaggtaggttgctgtattggataaagtataggtttaggataatttaagcggtagatagcaaaatagcacatcactgtcctattaaatgaacaataaggtgactatgcaagatctcaacgatctttattactacgttcaggtggtcgatcacggtggttttagcgcagccgcgcgagtgctgggtatgcctaaatccaagctcagccgccgtttggcgctgcttgaggacagattgggcgttcgcttggtgcagcgttctacccgacgttttgcggtgacggagatcggccaaacctattatgagcactgtaaagccatgctggtggaggccaaagcggcgcaggagtctattgagttaacccgcgctgagccacgtggcgtggtcagagtcacctgtccggtggcgttgttgcaggcgaacgtgagccagatgctggcggattacatggccagttgccctcatgtgagcgtgcatttggaagccacgaatcgccgggttgatccggtggcggaagctattgatattgcgataagagtacggcctggaccgattgaggacagcgatttagtgatgcgggtgctggccgatcgttgccagagtctggttgccagcccggcgttgctggcgcagtgcgatgaaatccgatcaccggcagatctgaccggcatccccagtttaggattagggcaaccgcagcagaattttgtctggaatttgcaaggcccaaatgatgctcacgcggcggttaatcatcagcctcggtttattactgccgatatggtggcgttgcgctgtgccgcgctggctggcgttggcgtggtgcaattgccgctgatgatggtcagggagcaactagagagtggggcgttgattcgcctgctaccggattgggcacccaaaccggaaattattcatgcggtatttccgtctcgtcgcgggttgctgccttcggttcgtagcctattggacttcctcgccgaacgttttgcgcaaattcacgaaacataatcgccggattatccgccacgccgtagcaaattcaccatattcacgaccgcggtggagcgctcgtggcggcgccaggccagcgtaatctgggtttttagctggtcatcatcaatttcatggtaggtaacattgtttgcatgaatggttgttagtgaacgcggcactacggtgataccaaatccggctgagaccatgccgatggcggaaaccaactgtggcgattgttgccccagttctggctcaaatccggcgcgataacaggcgttcataatggcatcaaacaagccggggccaacttcccttgggaaggtgatcagcttttcatgctgtaaatcccgcaggctgattttggcacaatggtgcagaggatgattggcgggcagcaccagcaccatatcttcttccactagcacctcacaggtaaattcggtactggcgctacaaggctggcgaataaaagccacgtcaatgcgttcgctgtgtaaatcgttcatcagcaccggcatgatttcttcgctaggcaataaaatgaccgcgggaaaggtttctcgatagcggtgcaacaaggataaaaccgccggttggaaagcggtggagctggcaaatccaacccgtagttttcccgtttcccctcgggcgatgcttttggctcgctcaaccgcttcatccgtcaattgcaaaatatgaagggcgtcggcatagaaagcctcaccggcctccgtcagttcaactccccggcttaaccgatgtaacagcggcgtacctatctctcgttccagcttttgaatttgctgactcagcggcggttgcgagatgccgagcttttcagctgcccgggtaaagtgccgagtagaagcgacggcaacgaagtaacgcagataacgatgttccatatatttttgatatcaaaatagtgaggttcctatattggtacttatgtcgttctcgcgtcaaccttataactaaacataagtgtaatttatgttacagataagagggagagcgacatgattaaacaagatcacccagtatgttcatgtgcagagacgattgcgcagagcttcattgcccatcagaaagggcatccagagtgtgttttgtaccaaacctcattgatgagtgcgctaattagtggtgtttacgaaggcaatatcaccatgaagcagctgcttcagcacggtgactttggattaggaaccttcaacaatctcgatggggagttagtggcgttcaacagcgaaatttatcaattgcgttcggacggtagcgcccgtagcgcccagcctgagcagaaaacgcccttcgcagtgatgaccttcttccagccgacggaaaaacgttgttttgagcataaaatgagccgccagcagattcacaatgtgattgatgatgtgaccgagaccgataatctgttctgcgcattgcgtatcgatggcaagtttagccacgttgaaacccgcaccgtaccgcgtcagcagcgcccttataaacccatgctcgaagccattgccgaacagccgacgtttgaattcgagcatcgcagcggcgtgattatcggatttcgcagcccggcttatacccaaggcattaatgtcgcgggttaccacgagcattttattaccgatgaccgcagcggtggcggccatgtacttgattatcaactggaaaacggagagctgactttcggcacgttgaccaagctggtgattgatttaccgcaggacaatgacttcctgaaagcagatttgacgccgttgaatctcgatacagcgattcgcgcggtagaaagttaattccccctgatgggtaatgagagcggtaacaaaggacaacgtcatgagtcatgaaattgaaatgcaggaatggaaatgcggtgccgatctggtggtgaatcatctggagcaacaaggtgttaagcaggttttcggtattccgggcgcgaaaattgatcgggtatttgattcactggaagattctacgattgaaaccatagtggtacgccacgaagccaacgccgcttttatggctggagccattggccgtttaaccggtaaggccggcgtggcattggtgacttctggcccaggttgttcaaatctggtgaccgggctggccaccgcaacgtcggagggggatccggtggtcgctatcggcggtgcggtgaaacgggcggatagcctgaaaatcactcaccaaagcatggataccgtcagcattttccggccagtcaccaaatttagcgtggaagtgaccgccgcgagcgcattgccggaagttatgggaaacgccttcagaaccgcagagtttggtcgaccaggcgccgcctttgtgagcctaccgcaggatattattaatgagccggtaaccagccgtattctggctcatcagccttgcccggttaacgggagtgcgcggacggaagatatcgtcgacgttgcggcactgctcaataaggccaagaatcccatattgttactaggtttaatggcgagccaaccggccaacgccgaggcggtgcgacgcctgctgcgccatagccaactgccggttaccagcacttatcaggcggccggggttatcgatcaggtgcatttcgatcgttttgcgggtcgggttgggctgtttaataatcaggccggtgataagttactgcaacaggcggatgtaattctcaccgttggttatagcccggtggagtacgatccggcgctgtggaacagcggccacgctaccttaatccatctggatgtattaccggcggaaattgacattgcctatcaaccggaaaaagagctggtggggaatatagccaccacgctggatgagctgaccaaacggctgaacggttcgttaatcctgacctcacagaccgaggctgtgctggaagaacgcggtcgccagcgccgtgatttggccaaccgagccgaacgcatgaacggttttgctattcatcctttgagattagttcgtgcgatgcaggatattgttaacagtgacgtgacgctgtgcgtggatatggggagtttccatatctggattgcacgttatttgtatagtttccgtacgcggcagattttgatgtctaacggccagcaaaccatgggggtagccttaccctgggcgattgccgccgcgttggtaaatcctcatcaaaaagtggtgtcggtttctggggacggtggctttatgcaatccagcatggagctggaaacggcggtgcggttgaagagtaatttgttgcacattatttgggtggataatgggtataacatggttgaaatccaagagcagaaaaaataccaccgtccttccggcgtcagtttcggcccgatagatttcaaaatgtatgcggaatccttcggtgccaaaggttttgccgttgaatctgctgatgaattaaccgccaaactgcgtcaggctatggacgttgacggccccgccgtgatcgcgattccggtggattactcagataattaccgtttaatggaagagttaaatatcagtcaactgctgtaggtgaacgaggttagatccgctgattttcataggaataagcagggtagttacagcgttgaagagataaaaaaaccggctgatgtttggccggtttgtatttttctgatcaatcaactttcggcggtttgccggtggaacagttcccggaacacgggataaatgtcttccggttcgcgaatatgctgcatagcgaaattatcgaattgtgcttccaaagcctcgtattcccgccacagggtttgatgtgcgcggcgggtgatttctatatagctgtaataacgcaccagagggagcagctttttcgccagaatctcgcgacatagcggcgaatcatcagcccagttatcgccgtccgacgcctgagcggcataaatattccactgcaccgggtcataacgttcctgaataacttcatccattaactttaaggcgctggatacaatggtgccgccggtttcctgcgagtagaaaaactcctgttcgtcaacttccttagcctgcgtatggtggcgaatgtacaccacatctacgtttttatacgtccggctcaggaacagatacagcagaatatagaaacgtttagccatatccttggtcggttgatccattgagccggaaacgtccatcaggcagaacatcaccgcctgactggaaggttcaggacgacgttcatagtttctgtagcgtaaatcgaaggtatcaataaaaggaacccgttcgattttctgccgtaattcagcaatttcttttctcagacgctcttcttccagcaactgagccggttctgagttttccagtaaagctaattcttcttccaactgatgcatcaaccgccgtttacttgcggtcatcgcggtacgacgcgccagcgagttttgcagtgaacgcaccacgctgatattggccggaaccccatttgccgtgtaacccgcgcgatgtgttttaaattcagtcagctgtttatattggttctttttcaaattgggcagggcgagatcttcaaatagcagatccagatactcatctttggagatctgaaagacaaaatcatcttcgccttcaccatccttaccggcgtttccctgaccactgcccgatccgccgccaccttgctggcgttcaacccgatcgttagtcacaaaatggtcgttaccaggatgaacccggtgacgtgcgccaccgcgtccctgatgaaacatcggttcgttaatgtcgtcgatagggatggaaaccgattcgccgctgtctacgtcagtcacagaccgtttgttgatggcctcggtaatcgactgtttaatctgcgccttataacgacgcaaaaagcgttggcggttaaccatgcttttgtttttgccgttaagtcgcctgtcaataaagtagcccataagtcccccgaatccgatcgacctgaatctcaccttcatctttcgaacggttgttgcgttggcggctttccttcaccccagtcacttagcgggctaaatgactggggggtgttcaattgccgccttgccgccgcccgaaatctcttggggagccccgttatttctcaagctgccgcttgaaatctattgggtttatacctgttatgccgaactgtatcggcaaacgggttatgaagattttcttacccgcagataccattcacacagcaggcgaacttgcttgcgggtataacctttctccatcatccggtcgacaaagtcatcatgttttttctgctcatccgttgaggttttcgcattgaaagagatgactggcagtaactcttcggtattagagaacattttcttctcaatgaccgtgcgtaatttttcgtagctggtccagttaggattacggccattgttattagcccgcgccctcagaacaaaattaacgatctcgttacggaaatctttcgggttactgatacccgctggcttctcgattttctccagttcggcgttcagtgcctcgcgatcgaacagttgaccggtatccggatcgcgatattcctgatcctgaatccagaaatcggcatagataacgtagcggtcgaaaatgttttggccgtattcagagtaggattccagataggcggtctgaatttctttaccgataaattcggcgtatttcggaatcagataacctttcaggtgctccagatacttctcagccacgtcctgctggaattgttccctctcgatttgctgttccagaacatagaacaggtgcaccgggttggccgccacttccgcgtgatcgaagttaaatacgcgcgacagaattttaaaggcgaaacgagtagataggccgttcatcccttcatccacgccggcataatcacgatattcctgataagacttggctttaggatcggtatctttcagactctcaccgtcgtacacgcgcattttcgagtaaatactggagttttccggctctttcagacgcgataagacagagaaacgagccagcgtttccaacgttcctggcgcgcaaggcgcgtgggttaactcactgtgttccaacagtttgtcgtaaatcttgatttcctctgaaacccgcaggcagtaaggaaccttgacgatgtatacgcggtcgaggaaggcttcattgtttttgttgtttctgaaagtgacccattccgattcgttggagtgagccaggatgatgccgttgaatggcagggcagagataccctcagtaccgttatagttaccttcctgcgtggccgtcagcaggggatgcaggactttaatcggcgctttgaacatctcaacgaattccataatcccttggttagcgcggcataatgcaccagaataaccataggcatcggggtcgttttgcgcgtgattttccagcttacggatatccactttcccaaccagagcggagatgtcctgattgttttcatctcccggctcggttttggcaatggcgatctgttgcaaaatcgaaggccaaactttaatcactttaaatttagtgatatcgccaccgaattcgtgcaaacgtttggcggcccacggcgacatgatggtgccgagataacggttaggaatattgtactctttcgccagaatggccgcgtcttcctgcggattaaacaggcacagcggatgatcgttaaccgggctgcgctcgccgttggcgctgagcacatagatgggtacgagctgcatcaaggcttttagtctttcggccagagaggatttacccccgcccaccggacctaataaatagaggatctgtttcttctcttccagcccttgggccgcatgtttcagataggaaacgatttgttcgatggcttcttccatgccgtagaattcttcaaacgcagggtatcgggcaataacccggttggagaatagccgagacatgcgtgaatccagcgcagtgtcgaccatcacggggctaccaatagccatcagcaaacgttcggccgcgttggcataagcactgcgatcctgctgacagacagtaagaaactcctgcagagtgaactcttcgtctttggccgcttcatagcgctggcgatagtgatcaaatatgttcatagcatgcccgtcctgtttgaatggttgggaacataaaaaagtagtagggctttattgggttaaaattttgaaactactaccttattgttatggtcgcgtctgttctaaaggtcaagttggccatggcgatagattgaccaattctgcagtgagggaaggtacttaattagagtattatgctaatattacggggttaactgattgaattatgattcttgctggttttttattctgggaaagtgccggtatactggtgtaatcaaaacgacataaattttacttactttctgttaacagcggtcaaatctatcgcaacctatttatctttgtaatcaatccgcagcgtcagactgcggctttcggtctaaggttggaatgagcgtcgggattgatgtcgtaggtcgataatctgaggacgggaaagaaaggcgcttagagattgatgcgatagcatcatttttatccgcagaagagtaacaataattttcactagttactataattgcttggctaattgcagccgtaaaccgcactgtgattgaaaatgttaccggtttggtaataggcatttcctttataaatcacggagtttttgcctgaatttatgtaaagttccagcagaaagccaacagttgctttacactaaggcaactaattatttgtttacatatggaatagacaatttgtgaaaacctttaaactaaaaactttggctgctgcagccatcgccattagctgtgccagtgctgcacatgccggtacctggtctttaggggcttccgccttagttagcccggatccgtatttgggcaaacaggatcgcgtttatccggttcctgtgatcaattacgaaggtgatgatttttatttccgtactctggctgccggttattacctgtggcgtgatgatagcaaccgtctgactctggacgcttactttctgccgttaaacttcagaccgaatgatagcgacgactggcgcatgaagcagttagacaaacgtcgcggcacgttaatggctggcgtgtcttatgctcataccgaagactggggaattattcgcaccgcgatttcgggggacatgctggataacagtaacggtttgatcggggatgtggcttacctgtataaattccaactgaacaactggttgttgacgccgggtgtgggtgtaacctggaacagcaaaaaccagaacaaatattactacggcgtgagtggtaacgaagctgcgcgtagcactttgagcgcttatgagccgagtgatagctggtcgccttatgctgagttgtctgcacattatcaaattaacgctagctggaatgcattcttccttggccgttatattcaactgtcgagcgaagttaaagacagcccaatggttgataaatcctataccggtatcgtctggaccggtgtgacctatactttttgattaatataatcagatagaatgacaggggccagcaggcccctgattttggttaatttaacgcttaactgacgcttcctcttatcatttccctagcgcgaatggcctattcgcaggcacgccttagatttttttgaagaacaattcgtttaatgctaataatcgtattgatatggattgaatttctatattggcgaaccgtttgaacgaagagttttcaggaaccttattctattttttagacttaatgggttctcatagctatttctgcgttcgattaaacggcgaatctcctatcccatattttaccaataatctggatgtatcctgttgtctatttactcagactaaaacggataagttaatcaggtaggtaaatggttaaggtactggataccagaagaaagttattattttatttatttcacccagttggtttatgtcatcaggacgcttcgttaattcatgatgatcattctcgggagagttacgagtcccgctgattattattttcagtgatatgctacacaggacgcatattaatttaaaggttttggctttcattacattaacgcattagccgaatggatggggattatcgaaaccagtctaaatacaaattataaattctaaagtgtagattcagagagtaaaattgaagtatttaatggaaaggaaatgatggaataaacagtgatgaatttatgttccccgaaaccggctaaagagcgatttatgaatcggctattcgcatattaaaacgacaatctctacgcttttgaaatcaatttcaccgatgcaatagctgctgagcgcaagaaagtcgccatatacatacgaatatatgtggttatctgctacaaggcatagacccatataaaaatggagcaccaggctccattttaacgtactgatattgcgtgcggcggcgttgttaggcgtttttgcggctgcgaattgtcattgcaaggcgagcaggcgcttcatcggccgcgaccatgggttgactgactcgcgcagtttcaacgcaaaacatggttttgtagccatcatttggcatatcctgcatgctgcaagacagctcagggcctgggttccaggcaacaacgtcgctttggtgatgatgatgaatctcaatggttcgtttcagcgccgggtctttaatcaggctgtaaggttccggttgggtataaacccgatctgtctggccgttaaagaccaggtcgccgctttgagcggcgtcgttgattttcaataccttatcgatgtacttctcgcccaggccactaattttaatctggctgatatccccgatttggaaataagtatgcagggcggcggcagcctgataatccccgtgggattccagctccatttcacattcaacgcccagtttgaaacgagcgattaacgtgaaggcatgtggccagtatttacgggtttcgtcgctgtctttcagcgtgaaagtcagcatcacgccgttatcattctcatcgtgcgcggtcagtgtccacggcagaatgcgtgcgaaaccgtgggaaggctgcgccgttggaccgaaccaaggccaacagataggtacaccgccgcgaatcgctacgccgtcggtaaatgcggtattgttgcttagccaaataaccggttgttcaccgctaggctgccatgccagcagatgcgcaccttgcagagcaacggcggcgcgtactttagggtgagaaacgaccacaacgggtaggttgtccagttgacgttggctgatataaggggagatttgttcaacaacgggcagactaaaaactttctcgttcattaatttggccttaattgaaaagtggcagttattcgttgaacctcagattatcgatagtatcacaagcttttctgtttttacctacggcttatatgtagcagattaatcattgatattgcgcaaatttatcggcattgaggcagagaaccgggggaggctaggggcataaaaaaaccgcccgaaggcggtttttactgatttcgacatcaatccattacttggagatgtgggagatcaggtccagaactttgttcgagtagccagtttcgttatcgtaccaagaaaccagtttcacaaagttgtcgttcagcgcgatacctgctttagcatcgaatactgaagtgagtttttcgccgttgaaatcggtagatacaacgtcgtcttcggtgtagcccagaacgcctttcagctcgccttctgaagctgctttgattgcagcacagatttctttgtaagaggcgggtttttccagacgtgcagtcaggtcaacaacagaaacgttaggagtaggaacgcggaacgccataccggtcagtttgccgttcagttctggaatcactttacctacagctttagctgcgccggtagaggatgggatgatgttctgggatgcgccgcggccgccgcgccagtctttgtgagacgggccatcaacggttttttgagttgcggtagttgcatgaacagtggtcatcagcgcttcaacgataccgaatttgtcgttgataactttagccagtggtgccaggcagttagtggtgcaagaagcgttagaaacgatttcttggccagcataagacttgtggttaacgcccataacgaacattggggtgtcgtctttagaagggccagtcagaaccacttttttcgcgccagcagcgatgtgcttacgagccgtttcgtcagtcaggaacagaccagtcgcttcagcaacaacgtcaacgttgacttcgttccacttcaggttagccggatctctctctgcggtaacacggatggttttaccgttaacaaccaggtggccgtctttcacttctacagtaccgtcgaaacgaccatgggtagagtcgtacttcagcatgtatgccatgtaatccgcgtccaacaaatcgttgattgcaacgatttcaatgtcagaacgttcttgagcagcacggaaaacaatgcgaccgatacggccaaaaccgttgatacctactttgatagtcatatattccaccagctatttgttagtgaataaaaggttggttgtaaaattacaaaaaccacaccgagcgtcaagcggaatcgtgtcaattcttgctgcaaatcaaaccaaacgagcgagtttgcacattaatcacacattcctgaaaccattggccacatttctatattggggcgaacccacaagtttaaagggcggggcggtaaattttgcgatttttatcacattaacgcacttcaaaccggaatgggatagagtctaggctaaaatctgctgctttgttgttaattttttgttattattacaccttgttttcgttgactttattccttgtcagagaaccgcacaaatggctaaagaacaaaaccctacaaaacctcttgagcaactgactgatatacagcgtcatgttacgcagaaccacggaaccgaagcgccattttccggcaaactgctgcacaataagcgcaccggggtgtatcagtgcctatgctgccagcaaccgctatttatctccgattccaaatttgattccggctgcggctggcccagtttttacgaacctatcgccgccgactctattcgctatattgatgattattcacataatatgcatcgggtagagatccgctgtggtcactgcgacgctcatctgggccacgtgttccccgacggcccgcagccaaccggcgagcgttactgtgtcaattcggcctcgctgaattttgttgacgatgagagtggcgaacagatagcgggttgaacccttatctcgacgtatttttaatttgcaattttgctgaaaaaacgattcagcaaattattcacttaggaatgcccaatggagcttgatgatttgattgcctccatgacgccggaaatttaccagcgtttgtcgcaggcggtggagttagggaaatggcccgatggtgtagccctgacggcagaacaaaaagagaacagtctgcaaatggttatgttgtggcaagcccggcataacacagacgctcaacatatgagtattggcaccgacggccagatcgtgatgaagagtaagcaggagcttaaacagcaatttgccaagcagccgctgattaagattaaagcgcaataattcaggcgagagccggaaccacactggcgagcatacaaaagcgaaacgggccattccgcctaatgctggtcatttaaggtgaccagcagcctttttatgcgggtactttttacattttgctctgacttcatgcgggtaacttcattcccgtcttaacggcaacatgcaatgtctggcctgttcttaaaatctttttaactctcccggcactgtctgttcccggcgagacccacggcagcgttataagtcgccgcattagcctggttatcgcgcggctaaactcagctatacggcagataatcgcctttcagagggtacgccgttttgaccatctggtagcgaacccaattgtaaacctcatcactcctgccgcatcattccgggtaacctgctgcgaagcgtctaactgtacaactcaaccctatcatgtttagagcttatctaattccgtcaagccgttcggctatctgtgacaatgagactaattgcgcaccggcgctccgcatttcaatcaacgccagctcactgtcttgcggttgcaggttaacaccgcgacagccttcggtaatcacccaggtttcatagcccagggtgagagcatctaacacgctgtatttaacgcaataatcggtggctaaacccatgaccagcagacggttaatactctgcgcttttaaccagtcatccagtgccgttttcgcccgtcgaccgttatcaaagaacgcgctgtagctgtctatctcggggtcctgacctttccgaaatacttgttgaatagctgaactgttcaggtggggatgaaaatcagctcccggttgatgctgcacgcagtgtactggccaccacacttgcgtcagtccattcagatcgccaatcgttcccggttgcgcattggagttaacggcgaaactgcggtggtttgccggatgccaatcctgactggcaataatcgaataatcccgtttttggcacagttcgatagcctgattcgctaccccgatgactttatcgccatcggtgacagccaatgcgccagcggggcaaaaatcattctgtaaatcaattaaaagcagggcggttttcattcaggctccgaagattaaccgacatcggttaattcaccacataggttctgttgcatcaattggcgaatttggtcggcatccagcggctggctgagcagatagtgcaatttggtcaacgccgcttctacggtcatatcaaatccactgatcacgccagcatgagccagagcattaccggtggcatagccgtccatattcacacgaccagaaatacactgagtcaaattcaccactacaatgccacgttcgctggcatgtttcagctcatccaacagttcggctttctgcggggcattacccacgccgtaagaacgcaaaatcagcgccttgaccggctgtagcaagaagttgcgcactaccgcgccggaaatccccggatagatagtcacgaccccaatgggctgcggcgtaatgttatgcacgatcaacggaccgttactggccggagagatgaccgaagttacgcggcgaatgtgtatcccggcttccaataacaccgataggttgggtgaggcaaaggcgtcgaaaccatcggcatgagccttggtggtgcgattgccgcgaaacagtttgttattgaagaacagggtcacttcgttaaccggatagtttgccgccagatacagcgagttcaacaggttggtttgcccatcggaacgcaactccgccaatggaatctgtgaccctgtcactatgaccggtttagccagattctccagcataaaagacaaagcggaagcggtaaacgccatggtatccgtaccatgcaaaatcacgaagccatcataaagatcgtaattctgcttaatgtcatcggcgatgtgctgccagtcttccggcgtcatatccgaagaatcaatcaaaggcgcgtattcgtgaatggtaaaatcgggcatttcaggacgatggaattcaggcatcagcgccagttgacgttgtaaatggccggataccgggatgtaaccctgttcagagcgctgcataccgatagtaccgccggtataggcaacgtaaatggatttcttttgcatgtaagcataccgctgagtgagatgactggattatagggtggctggcgcagaaaaaaagcccggcaagtaccgggctggagatttatctgttatttgcgttgtttatcagcgtacatcaccgcaattcaggcaaagcgcatagcgattctgtggatcgttcagattagtaaagaaacccggttgatcttttaccgccatggcgagcgtggaaactggcgctggcagccaagcttgcagcactgaaggcagcacggcgtgaaccgacgcccccatttgcccaaacagcatatcgatgaagcccggctgatcgacataccagttcagctggtaggttttcagcttagccagctcggcggcttttttcaccgcgtcatcgaagtcgcccagttgatccaccaaaccgttgtttttggcatctaaacctaaccagacgtgtccttgagcaatggcatcaacctgctcaggtgttttatggcgcgaggtagcaaccagatcgataaagttcttataaccattctcgatgctgatttgcatcatctgagcaaattcaggcggcaaattcttggtgacagccacgtcagccagcggcgaagtagctacgccgtcggtatggacacccaaggcacccagcgaatcctgataggtgttgaccacgccgaagatgccgatggaaccggtcagggtgcttgggctggcgataatgtagttcgccggggtggatacccagtaaccgccggatgcagccatcccgcccatagaaacgacaagcggtttgtttgcggcacgtagcgcggccagttcggagcgaatcagctcagaggcgctgacgctgccacccggactatttacccgcaataccaccgctttgattttcggattcaaacgcgcttcacggatttgtgccgcggtattatcaccgcccacgctgccgggcgtttgtggaccatccataatcgccccgttaataaagataacggcgatttcttcaccttgctgcacttttggagcaggttggtaatcgtaaatactgacggagttgtaatcgtttttttgcttgtcccagccgaaagttttgatcaattcagcttctaccgccggacgggaggccaactgatcaaccagtttatgttccagcgcgtactgcgccggatcgccaccaacctgctgcaagccgctgataataccggccgctccggggaacagttgttcaggagtgagctggcggttagcggcaactgccgtcagatagttattccacatgccgccgatccagcgggtatccgcttcacgcgcagccggagacatatcatcgcgaatcataggttccacggcggatttataagtcccgacgcggaaaatattggtcgtgactttcagtttttccagcagagatttgtagtacaggttattgctggcaaagccttttagatccaccgagccttgaggagacaggtagattttattggcgaaactggccagataatattgttgctggttatagctatcacccacggcatagataggcttgccactgtcacggaattcgcgtagcgctttgccaatgtattgcagagaaggctggtcggcaccggcaaaatcagacagggacaaaacgagcccattgatattgttatcggttttagcccgacgaagggtttccaccacgtcgaacagcgaattttcctgcagacggttgctcgatgcccctaacatttcgcgggtgaactgcatcactttattgttcactgccggcgtatctaccaccacaccggtcagattgaccagcagagcaccttttaccggttcaaccggcttgctttggaccatcagataaataccgacgcccacaacgatgaggaaaatcaggaacaggttaagaacgaattctctgacaaaattaagtagacgccaggtccacttgaaaaaaccgctaataattcgccacaaagtgcgcatgtgatctccaacaaatccgagcaagtgggggtatcctaatgacctacaaataaaaagtcagtattaaatcatcagacagctaaacgtattggtcaagctggtaacaaatcctctacttatgttaccgtgctgaaaatgaagatcgttatctggagaagagtatggatgcgttagatttgctgcttaaccgccgttcggcctcgcgtttgaccgcccctgcgccaactggcgaagcgttggaaaatatcattcacgccggtatgcgcgctccggatcatggtgcactgcaaccctggcgttttgtgctaattgaaggagaagggttgggacgtttcagcgaattgctgcaaaaagcagtgcgccatgatggctccgacgatgcggtactggaaaaggcgaaaatggctcctttccgcgcgccactgattattaccgtgattgcccatgtgacggaaaacccgaaagtaccaaactgggagcaggttgtttccgccggttgtgcggtgcaggcaatgcaaatggctgctctggcgcaaggttttaacggtatctggcgaactggctcatggacacatcattcggtggttcgggccggttttgcctgccgtgaacaggatgaaattgtcggtttcctctatcttggcacaccgcagttaaaaggttccagtaaggtgacgccgccggatgtcagcaccttcgttagccacttttaagcctttcccaatgcagcttaggccagaaattggcagcttaagctgcgtttccgtctgctttgtgaccaagctaactgcctgaacagccagcgctacttatcaattccctcggtaagcgctaccataggcgatatgttctttgcctatcataatcagtgttaattaatccgatgatggttaaccgagggaagtgatatatgacatcgccagcgatacgtcttacgcaatatagccacggagccggatgcggctgcaaaatctcgccgaaagtgctggaaaccattttgcactccgatcagcagaaattcttcgatccgcggctattggtgggtaatgaaacccgggacgatgcggcggtgtacgatattggcagcggtgtcggtattatcagcaccacggatttctttatgccgatcgtggatgatcccttcgattttggccgtattgctgccactaatgcgatcagcgatatctatgccatgggggggaaacctattatggcgattgcgattcttggctggccgatcgataaattggcgccggaagtggcgcgtcgggtgattgaaggtgggcgacacgtttgcgctcaggcgggtatttcgctggccggtgggcattctatcgatgcgccagagccgatttttggtctggcagtgaccggcgtggtcagtaccgaacaggtgaagaaaaacagcgccgcacaggcaggctgcaagctgtttttgaccaaacccttaggcattggcgttctgacaacggcggaaaagaaaagtaaattacggccggagcatcaaggcgttgcaactgaaactatgtgccaattgaataaatcaggcgctgattttgctcacattgccggcgttaccgcgatgaccgacgtgaccggtttcggcctattggggcatttaagcgaaatctgtcagggttccggtgtgcaggcaacgctacatttttcggcgattcccaaattgcctgcggtggttgaatatattgaagaaggctgtgtgccgggggggacgcagcgtaactttgacagctacggtcatctgatcgggcagatgtctgatttacaaagaaaactgttgtgcgatcctcaaacctccggtggcctgctactggcagtattaccggcggctgaaaatgaggttcatgccgtagctgagcgctatggcatgatgcttagcccgataggggaactgactgcaccgcgcaccgatcgcgccttaattgagatttgcgaatgattttcccatcgccttcaataccgatactaccgacgtttctttagggccgctaatgcaactgtttattgccgaaaaacccagtctggcccgcgctattgccgatatcttgccgaaaccccataagcggggggacggctttattgcctgtggtaatcaacacgttgtcacctggtgcgtcgggcatttgctcgaacaggcgcagccggatgcctacgatagtcgctatgcgcgatggtcattggccgatctaccgattattcctgaaaagtggcaattgaagccgcggccttcggtcagcaaacagcttaacgttatcaaacagttgttacagcaggctgatgaagtcgtccacgcgggcgacccggatcgcgaagggcagcttttggtcgatgaggtgttggattatctgggattagcggcggaaaaacgacagaatgtgcggcgctgcctgataaacgatctcaacccgcaggcggtagagcgggcagtttctcgtctacgcgataacaaagagtttattccgctgtgcgtttccgctctggcgcgctcacgggctgattggctatacggcatcaatatgactcgcgcttataccattctgggtcgtaatgcgggttacgacggcgtgctgtccgttggccgggtgcaaacgccggttctggggctggtcgtccggcgggacgaagaaattgaagactttgtacccaaggatttctttgaggttaaggctcatattgttacgccggccgatgaacgctttgttgccttgtggcagccaagcgattcctgtgaatcctatcaggatgaggaaggtcgcttactgcaccgtcccttagctgagcacgtcgtcaaccggatcactggccagccggcgcgggtgacatcctataatgataaacgggaatcagaaaccgcacctttaccgttttccctgtctacgctgcaaatcgaggccgccaagcgttttggccttagcgctcaacaggtgctggatgtgtgccagcgtttatacgaaacccacaaacttattacttatcctcgctcggatagccgttatctgccggaagagcattttgccggtcgtcattcggtgttgaatgcaatcagcgtgcatctaccggatttacagccgccagcggtgatggacagcgatcgccgcaatcgttgctgggacgataagaaagtggatgcgcaccatgcgattattcctactgcccgctccagcaaggtttcattgacgcaggatgaagccaaggtctataccttggtcgctactcagtatctgatgcaattctgtcccgacgcgatgttccgcaaatgcgtgattgaactggatattgccggaggaaaatttatcgccaaagctcgttttctggccgaggcgggctggcgtacgctattgggcagcaaagagcgagacgaggaaaacgaaggttcaccgctgccggtggttgctcaaggggacgaattgctgtgtgaaaagggcgaggtggtagagcgacaaacgcaaccgccgcggccttttaccgatgcaagtttattgtctgccatgacgggcatagcgcgctttgtgcaggataaagaactgaaaaaagtcctgcgcgcgaccgatggtttagggacagaagcgactcgcgcgggcatcattgaactgttatttaaacgcactttcctatttaaaaaagggcgttacattcatgccagccctgcgggaagggcgttgatccatgcgttgccggatattgccgctcgacccgatatgacggcgcactgggagtcgactttgacgcaaatcagtgagaaaaactgtcgttatcaggattttatgcaaccattagtggtaacgctgcaaaatttaatttatcaggcaaagcagaaccgaacgcctcaggcgtttcgtggtttaccggctgcgccggccgttccggctaaaaaaagtaaaaaaaccagcgtgaaggcaaaggagagtaaatcatgaaaaaaaccataatgatagggtgcctcgcgttgagcgttttattctgcagcacgacttgggcaaaccgcccaaacctgggaaataacgtggatgtggtggtgcctttgcctccggacatgtggaataacgccggtacgcgtggaaccaataataataactgtccccgctgctgcgtttatcaaaatcagaattactcggaaggggcagttttgcgggtggaaggcgagatattgcagtgtgtgcgggatccgaacgtcaccggaacccatccactgatttggaaacgacttcctcgttaacctatttggttgtccgttggctgataaaggcttccagtaaaggaatatccgccggagccaacggataatttagtgcttgctccggagtgacccagattaaagccgaatggcaatgcatctggggttctccgtaaaattcctctacgcgccaggcatgtaaacaaattctgcgatcgggtaaatctcgctggtggctggcaacgtaaccggaaattttggcgtcaatgtccaattcttctgctaattcgcgtcgtaacgcctgcggctggctttcacctggctcaacctttcctccgggaaactcccacaaaccggcctgatcgctgctttcatctcgctgagccagcaggattttgtcctgatgctgaatgatagcggcaaccacgtcgataagtttcatgaatataatctctcagaggagccattcggcgtataagaattgcgacattccccgtgttgccacggggaaaatagcgatgaaaatagttatagagaaaactcagaccagatcggggcgtgatcggacggtttttccatactgcggatctcgtaatcaataccggtagaaatgcagcggtctgcaagtgattgagtcgctagcacaacatcaatgcgcagcccgcggttttcatcaaagccgcgagagcgataatcgaaccaggagtaacgatcatgacaatcagggttggcggcgcggaaagtatcgaccagcccccagttttgcaaacgggctaaccattcccgctcttccggtaagaacgaacattttccggtgcgcaaccagcgcttacggttgtcttcaccgatgccgatatctaaatccgttgggctaatattgatatcgcccatgattaaaacctgcgcctccgggcttaattctttttccaaatagctttgtagatcctgataaaaacgttcttttgccgggaatttagtcggatgatcgcggctttcgccctgtggaaaataaccgttaatgacggttaaaacaccctgtggcgtttccagatcggccataataatccggcgctgggcatcttcttcatcggttgggaaaccacggcgcactgccagcggttgctgcttggtgagcagagcgacgccataatggcctttttggccatgataaaacacgtgatagccatgctggctaacttcttcaagagggaacatatcatcgtgaactttggtttcttgtagcccaataacgtccggctgatgttgttcgatgatcgccgctaattgatgagggcgggcacgtagaccattgatattaaaagagacaaatttcatagccagcgtcgtttcctgataaaaatgtgcgtgaatagtagcagatatccgataaaaatgtaatgaagtggggaggtggctgagtcgatagggggcgctttgctatagatttacattcagcgatttaaacttgttataggctgtcttattcacaatatagaaaatgtaatgactatgagtgggagtagatgcagttaaggataaactaacatgtattctggactatatatttaagaagtcagttaactatcccatcgttaaatattaaaatcagacttttatatggtgtaatattaaaaatagagagtgaactataatcctcacatctaacatttgccgcgtgtcagttattattttgttgataaattagcttaaaaaaagaatggtaaggtgttggtatttgaataagcctcattatttagtcatcacagataaataaatttatcatttgttatagtgacgtagtaacgttatcagcatgattggcaaaaaataggatttattataaatctggaatttattttgtttctaattttcactatctttattataggtaagccccgcgtttgacaatattttaactaaactatggtagtgaaatgcctcaagaatttttatgggttaacgccgctataatataaaaaataattctgttaatttattttaataggcttcagtgaaatggctttttttaggtcggctaattaaaatactctaacttttttagtagtgctgatcgacagttaaataatcagtcaaatgctaatataccaaattagaaaatcaataaacagccattctggcggtgtgaaaatttgcatatttaatattggttattatctacagctctggctgactatccctatttttatgatgaatattaacgtgtaaatgaataaaattaacacacgattatttttcattcatgaacgaataaaaattattagttaataagcatggaattaagtatcgagttttgttaaaaattatagaacataaactatatatatatttaaaaccaattcatgcatcgctgatgaatattatgatcttaaccgtacttcaaatacataaatgtcattttatgagccacttttacaatacgtgtttactgttcttattttagatttaacctgttgtttttagtgattttttttcaataaaatgaagttgagaaagtttagtgattgtgaaaaaacaatttgtccgggtaaccggtagcatttttaataatcaatggttgaataaaggatggtgaactatgtttttatctagaaaactagaggcatttatggcggttgtggaatacggttctttaagtaaagcggcgcgagttatgaatcgcactacgccacccgtagccaaatcgattaaagactttgaaagtattataggaaagaaactgttcaaaagagaaaaatttggcatgagcctcactcatgatggagaagtgctatataatgatctgaaggatcttcatcagcaagataaagaaattaccagcaaacatcttacggggcatgtttctaatgcggtgaatatttattacgattggggtaaggtggatagcttaacaaaaatatgggaagtggcagagaagaacaatatacatgcaagcattattagattttgctatgaaatgattgatgatatttgtgactttgacggaaatagcttgattatctcttcagagaaaattctttgcgacagattttctctcattaaagaagcctgtgataccggtttgggggtttatgcccgtaaggaaattattggtgaaaattcagatattatcaatttattacgtagcaatacttggctatgcaatccaatactgtataagagcgaatttataaaatcgttagaagaagaggtgaagaagtctgtgagcaaagttagcatcagacaggtagataatttaaattgttgcctgagttttatcaattctggtaattatgtttgtattactgactcgattatcgatagttttgccgtttgtaataaactaggttttgttaaccttaaagatcactttggcgatcataagttctacttttataaatccagatcgcattccagcgtgctcaatgggttaatagactttgtaaaagcaataaactgataagtaaaaattagcgcactgaggtatacagtctggtagtttgtcatgtttgttggcattgattcttgatctatataagactcagatagaggaatatttatatttcttttatcgtggttggcatgctgacaaacattacttttgagtcaatagggatgtaacgcacccagtgtcactttcgcgctgagaaccaacatgtattccatttgggtaaagcatcgccattgaatgagggacgggggtctatcgcattgggttgttcatattgcctctcgtcaaaggtttggcgatagaacgagtttagagcctagcaaaggatagagaggatataccgggtgtcggtggcggaaaatagggtgtggtttggcgaaatttaacctggttaagcacctttttgattttgaaccgaaataaaaaatcattttgaaccgaaataaaaaatctatagtgcgatcttcgtttaaattgacgagtatatgactgagcgcatcctgttcaactctatccaagggctgttaactaaggggaatgctgctcatcttagcttctgcctgaagcgttaaggcctgctagaaggcgaaaggagtttattggtaggataataccggtagttgggggagcatcatttcgttcttcacccttcgggttaccgaagtgcaatgttgtctcacgctgctcgactcaaaccctgtcgaaagttattaccttcgcccaaaatatctaagggtggtttggtgatggggttaataccttggaaatataatagagatggtggtgggggaaggattcgaaccttcgaagtcgatgacggcagatttacagtctgctccctttggccgctcgggaaccccaccactgaattcgtggtttttatttctggctaaatacctggccggtattttttaatgattttgctattcatcttaattactgcgcttggctatttaatattccgaataacctaacaagccagtttaaaatggtggtgggggaaggattcgaaccttcgaagtcgatgacggcagatttacagtctgctccctttggccgctcgggaaccccaccactggcctaactgcttagaaacgttgtctcggtaagcggggcgcatcatatcaaatgaagcgccactgtaaagacttgatttgaaaaaaaagatttgtttgccgtttttttgctcttgaaggtgtttcttcaaacaaaaactaacgatttattgtgcagttacagaataactgtgcgattaccgtaaacaaaaacgcgctgcgctaaaacacgataaagtgcgcggctcagtacgtttttctccacatctcggccagcacgcatcatatcttcagcggtataagaatgatcgacgtggataacgtcctgcatgataattgggccttcatccagactgtcatttacatagtgagccgttgccccaataattttcacgccgcgttcataagcctgatgataagggcgtgcaccaataaaagctggcaggaatgaatgatggatattgataatttggtatggatagcgctgtacaaaggcaggagttaatacccgcatatatttggccagaacaacataatcaggttggtattggtcgatctgcgtaatcagctgttgatcgtgttgatcccgagttaatccttcatggctaaccagatggaaggggatatcaaaccgctcgaccaggtgtcgcaatgaatcatggttaccaatgacggcggcgatttctacatccagtccaccataagcgcttttcattaacaggtcgccaaggcaatgagcttctttggtgaccatgataacaatgcgtctgcgccctgcagtatgcagctcgcggctggtaccttcgggcagtgcatcatccaaatcggcgagcaacgttgtgtcgttaaagatcccttccagttcggtgcgcataaagaagcgcccggtcagatgatctacaaactcattattttgaacaatattaagctgatgcttgtaacaaatattggtgatcttggcgattaaccctttggcatcaggacaaatggtacgtaatacttttctttgtatattctggtgtggcataagttggtcaatcctgtctgagatatctttgatgttgtgttttaattcgatgcagccagattaggcacgtttaggcgtaaatcatccgcagcatttcttatattttttgcctgaaccgcaaggacaactgtcgttcctgccgacctgagggcgtattccatcaatatagtaccagcgttcatttaaacgaaggaagcgcgaacgttcatgcatcatcgaaatggcaccgctattgccttctttaaatcgggcaacaaactcgacaaatccttcatctggatgggaaccggccgcttcttctctaacggttaaacccaaccactgcgtgcctgcaaaaccctctgcgatattgtcacgccatttttctgcatggcaatcgggatgccaggtacctaccaaataattgacgtcttctttgacataagcgctgtagcgcgaacgcatcagaatgccaggcgtagctgctactttagcgccgagaatatagggttcgcagcaaagttcgtaatttatacggcttccgcaggggcaagactctgtcaaaatatctcctgataacataattaaattcgcgtaatgcaatctcttcgtggcaaggttgtgtaatgacgattgcctgacgcaattttccaggatgtgcacaggaatgattaaattgtgcagatcggtccaatttgaaaggtttcagccgtatatcttacctaatcaccccccaaggttcaaaggcatggacttaaaatgggaatcgcgtgtcctgtgttttttattgtgatgccaatggctaaaattgaccggtgtttcattttaatgtaaattgcgttttgtgatttagatcacattgtaatggcgaaattgaaaggtcaaaatcatgaagttaatcaatagaatcatcgcgatgttcgaaaacatgcatatctctttcggcacattcaacgcctaatcattttctggcgtttttacccaggcctgatgaggtctgggtatcatttaactcaactcgctgatagtgagtcgtattctacgattccgatagtgttcttcatcttcactttgcctcatccctcaactcccccaggtaagattccgtcctcagattgtgctccatataaacgttaccgtctcattaaacgggtgggttatcgagatgcctcgtagcaattattctctgttgcaatacgattaactttctctgtgagactccgtgcaaaatgcaagattagtcacgattacttacagccaaagattggattgttcacttatgatgctgtaattcagcgattagaacgcgatggttcgatgataatcagggttataaattgctcgataattcatttggttaatttgatgaatcagatggcagagtgatgactaacaaggatgttagctgtatctcactaatgagaattaatgaaattacaactaatgaaagcgtgcatgatgctaagtcctgtgggcagtatagccaaatagacgctgttaatagttttgagcatagctgacgttggttgcgaaacgggaaccgtattcgagtgagatataccgaaacacatgcgagtggataatgcgacaaataaaggtaggtttagctcttggtgcaggtgcagcaaaaggatgggcgcacattggtgtgatcaatgcgctgaaaaagctggatgtggaaattgatatcatcgccggttgttcggttggtgcactcgttggcgcggcgcaggcgacccagcacatgccggaactggagcgttgggtcagatccttcagctattgggatgtgattaaactgatggatttttcatggcgaaggggcggattactgcgaggtgaacgtgtatttaatacggtgggcgaacttctttcaatcgatgacatgagccagtgcgccattccttttggggcggtagcaaccaacctgagtactggtagagagttatggcttactgaaggcaatatccatcaggccattcgtgcatcctgtagcatgccgggattgttctcccccgtttggcttgacggctactggctggtggatggtgcggtggtgaatccggttcctgtttcattgaccagggcaatgggggctgacgtggtcattgccgttgatttacagcacgacgcacatcttatgcagcaagatctgctttctatcagtatgccaacggaggaaactccttccgatatgccacaaaactggcgcagtcgcctacgtgatcgcattgcccatctggcaccaaaacgttcgaatacgcctccgagcgcgatggaaattatgtctacctctatccaggtgttagaaaaccgcctgaaacgtaaccgtatggccggcgatccacctgatgtgctgattcaaccttattgcccacagatatctactttagattttcatcgggcgaatgaagccattgctgccggtgaatcggcggttgagcgcaaacttgagcaattagtgcttttagctaaaagaagaggaaaaacacagaatggaaataaaaattgacgtcatggccacttctggcaagcacaagtcacctttttgagccactattagcacaacgatagctaagagataacattgcatggacaaaccgtttacagataagaacattttgattgttgaagatgaaatggtctttcgcacggtactgaataattatctgagcaacctaggggcttcgatattacaggcatcgaacggtcttgaagcattgaatttgttggaaaacagtatgcctgacctgattctctgcgatttggctatgccagaaatgggagggattgaactggttgagcaactgctggttcgggggattaaaactccggttctggttatctcagccacagacaaaatgacggatatcgcgcaggttctacgtttgggtgtaaaagatgttttactcaaacctatagatgatttacatcgcctgcgggaagcggtattgacttgcctgtatccgacattgtttagctctccggcgattgaggaaactgaacttattcaagactgggatgcgctgaagaaaaatccgtttgaagccgctcagttactgcatcagttacaaccgcccgcgcaacaagttattgctcgttgccgcgtgaattaccgccagctaaccggcgttgatcaaccgggattggttttggatatcgccgcactttctgatagcgatttggctttctattgtcttgatgtcactcgagccggtgataatggtgttctcgcggcattattactacgggtgttattcaacggtatcttgcaagaacacttagccggtcgccatcaccgtctgccgcaaatgccggcgttgcttaaacaggttaaccaactcttaagacgagcccatcttgaagggcaattccccctgttggtcgggtattacaattcggaatacaaaaacttgatcctggtttccgccgggctgcatgctaatgtcagcgcgggtaaaaaccatatacagctgagtaatggcgtgcctttgggaacgctgagaaccgctcatttaaatcaaatcagtcagcgctgcgaggcttggcagtgtcaggtatggggagggggcagccaattaagacttatgctttctgctgaataatattcattatgcttatttaccattcgtcatccattatccccactgtcttatttccctcccttttttaagtctcgtatgtagcctattttttgaaccaatgaaaagaaactctgacctgtaaatataagtcagcttatatccttcgtttttccgttgattgctacacttcaattgccgggtcttaaggttacgttaatgcttctctcttaaactacgcttaatggctgacagcatgcggaaatagtcatgcccttcgtggcggcttaggctattgaaaatcgcaaactaatcatgcaacaccggattaatcgcccatgttgaatctgaaaatgttaacgatggttgataaagcattaatacagactgtgcaattgtgtgctgctgccagcagtagccactaacgtaccagggtttttattcatctaccttttattctagtggtccgagagttcggtgaatcgccgctgcaaacggtttgtatcgtttcgacaatgtgtcattagcgcaatacatgtagcggtatgctctggcttatttattaaacattcgatcgctaaagatgattgaaagtttcgtggctaacaattggttttcgatttaaacggttagggtaaatataatgaaagtaaccatttttggtattggctacgtcggattggttcaagccgcagtatttgctgaggttgggcatgatgtactttgtattgatgtcgatgcacgtaaggtagaaggcttgcaaaaagggcatctgccaatttttgagcctgggctgtctactttggtaaaagaaaacgttgaggctggtcgtctgcatttctctacggatgcgaaagctggtgtacatcacagtgccatccaatttattgctgttggtactccgccagatgagaatggtgccgcagatttgcaatatgtgattcaggtttcagaaactatcgctaaatatatgatggaacctaaagttatcattgataaatccacggttccggtgggtactgccgataaagttcggagtgccatggctgcagttctacgtcagagagatatagagatcgactttgatgtgatatccaatcctgaatttctgaaagaaggggcggcggtatccgactgtaagcgccctgagcgtatcgtaataggtactgacaataatgacgtgattccacttataagtgagctgtatgagccatttaatcgtaatcacgaccgtatgctggtaatggatgtgcgcagtgctgaactgacgaagtatgcggctaactgtatgctggcgacaaaaatcagttttatgaatgaaattgcaaatctggccgaactattaggcgcagatgtagaaaaagtccggcagggtatagggtcagattcgcgtattggctatcactttatatattcaggctgcggctacggtggatcctgtttcccaaaagacgttcaagcattaattagtacagctgagaatattggttatcaaccaaaactgttacaagccgtagagcaagtcaacattcagcaaaaatccaaactgactcagtttattaaaaaacactatggcgataacctggctggaaaaacttttgcgctatggggactggcatttaaacctaataccgatgatatgcgtgaagcgccaagtcgtgttttgctggagtcgctgtgggaggctggtgctattattcaggcttatgatcctgaagctatggacgaaactcagcggatttatggttcgcgtgacgatttgagattaatgggaactaaagaagctgcgcttcagggggcagatgcgttggttatttgtaccgagtggcaaaactttcgagctccagattttgacgttatcaaatccagattgaaagaagcggttatttttgatgggcgtaatttgtacgacccggagcgcttaaatagccggggctttatttattatgccatcggccgcggagcatcggttaatcacgctaactcgcgctaagtaagaacattctgagcagcggtatgttttacaacggcatactgctgcattttctgatttttctatccacgttaaaaccgtaaattttcttctgaataaatctgacgttggtaaaactatgacgacactttacctgaaatttaaaactaactattaatattgttatagattagcagagtattcttatggatttgctatgaaaatgataacggagagtaatttatagagaagtgtaatgattggtaagaaattgggaattttttctgggttaaggatcgtttttaaaacccaataaaaaataccctcaacataagaagagggtatttctcagataatagtaaatgtttaaatactattacagtaggaaatcgtccagcgatttaccttgttcatcgagagctttcttaatcacagctggagtacggccttggccggtccaagttttcagttcgccattttcatcagtatattggtatttagctgggcgagctgcacgtttagctttgcctgctgctttagctgtacttaaagtggccatcagctcgttcgggtcaataccgtctgcaataagcatttcacgatattgcgacagtttacgctcacgttcttcaatctcagctttagactgacgttcttcttcaacacgctcttcaacaactaccttcagcttctcaagcatttctatcaatgtatcaacgttacattcgcgcgcttgagcacgtagagtacggatgttgtttagaatttttaacgcttcgctcattgtcctggtctcaattataatgttggggggcgtctggataataatagagtgctattttaatttctgcaatagccaatttgattagcttactggaatttactctttttaaaagctgaaagttgtctatcgttagtaataagtgatgagttcgggcaattagtttgcacagttctaagacaaattctcgatatgtgagtaaaagttgcaattttagaacatgattttctcactaagctataagtatgctttatatcaataaagcaaaaaatagagcgttgttgattgtgcttgctcgtttacaaccatcgaaaaaaatgtggatatagatgacaaaatcgactttgccaaggatacctttaaccggataaagtcgcaacgacactaataaatatgtctgttaggtatttaatgttaatttctatcgctgccatgatgcatgggattaatgagtaaaatgggctattgttgaattcgatgttttttttggtttttactccttttagtacagccccatgtttggggaaaatctttaagcgcgatgaaactgtgaactcagtcaaaaaatagcatcgaatggattcttaaatcagtccaggtaaaagaagccggaatgctttcatcgcattactcaatttattaaacttattaacctcctgcatcccctgtcagcttgcgcataaagtttgtgttacactatggcatatcgttaatttgcgcttttaatataccagtggagttacgggcccatggctcagctttatttttattattctgcaatgaatgcagggaagtccaccgcattacttcaatcctcctataactatcaagagcgtggtatgcgcacactggttttcacggcagagattgataaccgtttcggcgttggcaaagtcagttcacgtatcggcctaacctctcaggctcagctttataataatgaaacccaattggcggccattatagaagcagagcaccatgataagccggtgcattgcgtgctgctggatgagtgccagttcctgaccaaagagcaggttaggcagctttgccacgttgtcgatgaatatcatattccagtcctttgctatggcctgcgcaccgatttcctcggggagttatttaccggcagtaaatatttgctggcctgggctgataaattggtggaattaaaaaccatttgtcactgtggccgtaaagccaatatggtgctgcgattagatgcgcagggcagagcggtgcatgatggtgagcaagtagtgattggtggtaacgaaagctatgtttccgtttgtcgccggcattataaagaagcaatcagtgcggcctgcacgccgttagctgggcagggcgatatttaatcctcgagaatccccctcagaagccccatggacgttttttttgtcgccgtagggtgacttacctttttgtctttcctcgtattagcattctgttgacgtcgtttgaacctaaactcaatggcacagacagatacgttcgttaatctatgtaccttagccgatgaataataggaatagcggcagataattatgatcgggtcgatattcactatgagtctcgatgacggggaaataatgggtagggtttgacaatgttgctgcacaagaaaaccccccaatcagatttaccgattgaggggtagacagtttgctgattacccaccgttagatgagcagtgcagtcaaatgattacttcttggtctttttttctgctttaaccacttcttttgcagctgcttcttcacgttcgaattcttcgacgtattcgcggccataataagtgtccatcagaatctgtttcagctcagagatcagcgggtaacgtgggttagcaccggtacactggtcatcgaaagcatcttcagacagtttgtcgaccttcgccaagaagtcagcttcctgaacgcccgcttcgcgaatagaagtcgggatacccagttcggctttgatttcatccaaccaagccaacagtttctcgattttctgtgcggtacggtcgccagcggcagccagacccaagtggtcagcgatttcagcgtaacgacgacgtgcctgtgggcggtcgtattggctgaaggccgtttgcttagtcgggttgtcgttcgcgttataacggataacgttagagatcaacatggcgttagccagaccgtgcgggatgtggaactcagaacccagtttgtgagccattgagtgacagacacccaggaaggcgttcgcaaacgcgataccggcgatagtcgctgcgttgtgtacacgctcacgtgcaaccgggtttttcgccccttctttgtagctggctggcaggaattctttcaacagtttcaacgcttgcagcgcctgaccgtcggagtattcgttagccagtacagagacataggcttccaaggcatgagttaccgcatccaatccgccgaaggcgcacagggatttaggcatattcataaccaggttggcatcaacgatagccatatctggagtcaatgcgtagtcagccaatggatatttctggccggtagcatcgtcggtaacgaccgcaaacggtgttacttctgaaccggtaccggaagtggtggtgacggcgatcattttcgctttcacgcccattttcgggaacttgtagatacgtttacggatatccataaagcgcagcgccagttcttcgaagtgagtttccggatgttcgtacattacccacatgattttggccgcatccatcggtgaaccgccacccagcgcgataatcacgtctggtttgaaggagttcatctgctcagcacctttacgcacgatgctcaacgttgggtcagcttcaacttcgaagaagacttcggtttcgataccgtgagatttcagcacgctggtgatttggtcagcgtagccgttgttgaacaggtagcggtcagtcacgatgaaggcacgttttgcaccgtcagttgccacttcttccagcgcgattggcagtgagccacggcggaagtaaatagatttcggtagtttatgccacaacatgttttctgctcgcttagccacagttttcttgttgatcaagtgtttcggaccgacgttttcagagatggagttaccaccccatgaaccacaacccagcgtcagagacggtgccagtttgaagttgtacaggtcaccgataccaccttgtgaggcaggggtgttaattagaatacgggcagtcttcattttatcgccgaagtatttcacgcgagcagtctggttatcctggtcggtgtacaggcaagaggtgtgaccaatcccgcccatttcaaccagtttttccgctttatcgactgcgtcttcgaagctcttcgcacgatacatcgccagagtcggggacagtttttcatgagcaaacggctcggattcgtccacaactttcacttcaccaatcagaatcttggtattgcccggaaccttaataccggccatttcagcaattttagttgctggctgacctacgatagccgcgttcaggccaccgtttttcaggatgatgtcctgaacggctttcagttctttaccttgcagcaggtagccgccgtgggaggcgaaacgttcacgtaccgcgtcgtatacggaatcaacgacgataatagattgttcagatgcgcaaatgacgccgttatcaaaggttttagacatcagaatagaggctacaacgcgtttgatatctgcggtttcatcaaccacaacaggcgtgttacctgcgcctacgccgatagcaggtttaccagagctgtaagccgctttaaccatgcctgggccaccggttgccagaatcaggttgatatctgggtggtgcattagttggttagataattcaacggtaggggcatcaatccaaccaataatgtcggctggcgcacctgcagcgatagcggcttgcagcacgatatcagcagctttattggttgcgtctttagcacgaggatgcggagagaaaatgataccgttacgggttttcaggctgattaatgccttgaaaatagccgttgaagttgggttggttgtcggcacgataccgcagattaaaccgataggttccgcaatagtgatggtgccgaaagttttgtcctcacccaagatgccgcaggttttttcatctttgtaagcgttatagatatactcagatgcgaagtggtttttaataaccttatcttcgacaatacccatgccagattccgctacggccaatttagccaaagggatacgggcatcagcagcggctagggcggcagcgcggaagattttatcaacttgctcttgagtaaagttggcatactcgcgctgggctttcttgacgcgtgctactagctcgttaagttcagcgacattcgttacagccataatgctctcctgataatgttaaactcttttagtaaataagcagttgaagcaactagtatagtcaggctatctcgtgctgcattgtcgaataggaagacttttcgcattctactcaaccattactaccgctgatttactgaaagagctttctttatttttgtcggggtgcggatttgaagctaaccacaactgacctttccaagctctctacctcttttcctatgacagagcttaactattcttaggtatggatttcgtgatttaaatcacaaaaacgtcaagctgacacctttcagcagcgttgaattgagaattaaaagcattaaaaccataaaggcgatattttatgacgttaaaacagcagaaaagacacactttgttaacagttgctcgcctattttttgagtaaacttattgcgtattaaaatgctgatctaatccatagattccccaatgtaattccattacattagcgcgcatatagatgaaggctgtgcgttatgccagtccggcagccaaaataactgcctgaatggctccaagcggcgggtttcttctgtagtagcttgtagtcgcgccgtcacctgagcaaaaactggtcagggaggcgctaatcgacggacattaaccgctaatggtggttattgcgccgaggtactttatattagcgatagtgcggagtgggtgtgagtcaatcactgttggacctgtcaggctacatcaagttttttgttggcttgtttgcgctggttaacccggtaggaatattgccggtatttattagtatgacgagttaccaggcagaagcggggcgcaataagacaaacctgacggcgaatctttccgtcgccatcattttatggatagcgctattccttggggatgccatcctgaaagtatttggtatttctatcgattctttccgcatcgccggcggtattctggtagttagcattgcaatgtcgatgattagcggcaagctgggcgaggataagcaaaacaagcaggaaaaaaccgaaacggcagtgcgggatagtattggcgtagtacccttggctttaccattaatggcaggcccaggggcgatcagttcgactattgtctggagctcccgctatcacagttggctaaatttgctcggtttaactcttgctatcgccttatttgccttctgttgctggctgctatttcgcgcggcgccgctattggtacgcttgctagggcagaccggtattaacgttatcacccgaatcatgggtttgctgctgatggcattaggtatcgagtttattgttaccggtttaaaggccagcttccccggcttactttaatttaattaatttaatctcgcgatgataccggctggccgacctatatcctcggctggccggtttccttcctctcgctttcattttttgttttatttcccacttatccggttcttcaatatccctgtattttcctaaaccccatcccgctgcattaatttggtgcgaacagtgcattaattttaaccagatgcactttaatgtggcgtaaataaagctctcctgcctttaaactgacttaaagcctatttatctgtgtttacgcactggcatcagcgccgtttgattaaaataaatccgtcatttgttgttaatttgctcacatgattctgtaatgcttgtgtggaatttatctagatgttattagtgattaagacaacatatccagatgtttattctgggaatggtataaatgttaattttatgtttctttctgcgggttgtgcgaaatttcattagttcaattttttccttccctctgaattaatacagttaaatcagattgttgtgtaacttgttgggtggagttaatactatgaaagattactcactcaatgtaagaaaagagaattgcttaacatttctgtaaaaattattggcgtagattttctgcttctgttagctttcgaaccacttccgaatgagatttttctgtgttctctgcaaaaaatgagcatggatattgcaaggaaatgagcagtgcagcgcggtattggctccagactgaccctaaccattaaaaaaaacatcataaatttggaaaaaggactattggacatgcagataaatttgaagcgtaagccattaacagtacttagcactattctgagtttatcttttccttgtatggtcggtgccgcaactgttcctgccggcgttgaattagccgcaactcaatccatcaccattaataacggcgcagaagttgcgtcgctcgatcctcataaagttgaaggcgttgcggaaagcaatgtgattttaaatttgctggaaggtttggtgagtaatgacgccgatggccatattatccccgccgttgcgactcattgggaaaataaagattttaaggtttggactttccatctacgggatggcgcggtttggaatgatgggtcgcccgtgatcgcagaagattttgtgtacagctggcagcgtttggctgatcctaaaataggttcgccttacgccagttatttgcagtacgctcaaattgaaaacgttgacgatattttaaaaggcacgaaaacgccgggcactttaggcgttaaggcattggatgctaaaacgctacaggtcacattaagtaaacccgtaccgtattttgtcagtatgttatcgcatacttcaatgaagccagtgaatcgggctgcggtggaaaagtttggcgataaatggactttgccgggaaactatgtcggcaatggtgcatacaatctgaaagattgggtggttaacgaacgcattgttattgaacgtaatcctacctattggaataataaagcgacagtgattgatcaggcgacgttcttgccaatagcctctgaagtgagtgatatcaaccgttatcgtagcggtgaaatagatattaccagtggtgctatcccgccaactttattcgccaaaatgaagcaagatctgccaaaagaagttcacgtaagcccttatctctgtactttctattatgaaattaataatggcaaagcgccgtttaccgatgcgcgcgtgagaaccgccattaaattgacgctggatcgggatgtgatcgccaataagattatgggacaagggcagatcccagcttacggatttacgccaacgtttatggaaggggcgaatttcacattgccggagtgggcgggttggtcgcaagaaaaacgtaatcaagtggcaaaacagctattggccgaggctggatataacgataaaaatccgttgaagttcaatttgctctacaacacatcggatcagaataaacagcaggcaattgctgccgcatctatgtggcaaaagaatctgggtgccaaagttactttgcagaatcaggaatggaaaacttcgctagaaagccgccatcaaggtcaatttgacgtggctcgagccacgtggtgcgcggattataatgagcctagcgccttcctgaatatgctgttatccgacggtagcaataataccttcttctataaaagccctgaatttgacgctattttggctaaaacgctgaccgcgtcggatgaaaaagcccgcgccacgctataccaacaggcagaaaatttactggataaagattcggtgatggttccggtgtattaccgggtcagcgcccgacttattcggccaacggtaggcggttttagcggaaaagatccgcaggacgctaccgatataaagaatttgtatatccgtaaactctagcagagtcagtaatatcgtagtaaaaacaatgatggcagtgaaatagggatgtatgacgcagcgtcagtgcggtgttaatacatgtggggtcttacttcctgtggattcgttcctccataggggtaaataaaaaatgccttttaaaaggtgaggcgtattcagtcactggataacgcaataataaaaaactggagttaagataagtatgaccaacatcacaaagaaaagtctcctggccgcaggtatcatcgccgctttgggtatagcgtcggtcagcagcagtttcgccgctgacgttcccgccggcgttcaattggcagaaaagcaggttttagtccgtaataacggttctgaacctcagtctttggatccgcataaaattgaaggcgtgcctgagtcaaacctgtcccgtgacctgctggaaggcgtagtgatcaactcgccaaacggtgatattgttccgggtgtggcagaaagttgggataacaaagactttaaggtctggactttccatctgcgtaaagatgctaaatggtcaaacggtgaccctgtcactgcgcaagacttcgtttatagctggcaacgactggccgacccgaaaacggcttccccttacgaaagctatgtgcaatatgcgcatatcgcgaatatcgatgacattattaccggtaaaaaacccgctgacacactgggcgtaaaagcgctggatgatcatacgctggaagtcactttaagcgagccggtgccttacctggccaaattgctggcgcacccgtctatgtctccggtgaataaagccgtagtcgagaagtttggcgacaaatggactcaaccaaagaacttcgttggcaacggtgcttataaactgaaagactgggtggttaacgaacgcatcgttctggaacgtagcccaacctattgggataacgaaaaaaccgttatcaatcaagttacttatctgccaatttcttcagaagtgactgatgttaaccgttatcgcaccggtgaaatcgacatgacctataacaacatgccgatcgagttattccagaaactgaagaaagagatccccgatcaggtacatgtagatccttatctttgtacttattactacgaaatcaataatgcgaaagcgccatttaccgatgttcgcgtgcgtgaagcattgaaattaggtatggatcgcgacgttatcgttaataaggtgaagaatcagggcgatctgccagcctttggtttcactccgccttataccagcggtgccaatctgaagcagcctgagtgggcgagctggacacaagaaaaacgtaatgaagaagcgaaaaaattgttggccgaagccggttataccaaagataaaccgctgacattcaacctgttgtataacacttctgatctgcataaaaaattggctatcgccgctgcgtctatctggaagaaaaatctgggtgtggacgtgaaactggagaatcaggaatggaaaaccttcctggatacgcgccatcagggcaatttcgacgtggcgcgtgccggctggtgtgccgattacaacgagccttcttccttcctgaatatgatgctgtctaacagcagcaacaataccgttcattataagagcccggcctttgacaagctgatttctgatacgctgaaagtgaaaactgacgaagagcgagcggcgttgtatcagcaggcagaaactcagttggataaagattctgccatcgtgccggtgtattactacgtgaacgcccgtttggtgaaaccttacgttggtggctacaccggtaaagacccgctggacaacttgcacgttaaagatctttatattatcaagcattaatcattttgagggcggtttcctatgggaaactgcccttattgtttcgataatataaagccgtagtaaaaggctaaagacacaggtacgggcaatgttaaagtttattttacgccgctgtttggaagcaattccgacgttatttatactgattactatttcattctttatgatgcgtcttgcgccgggaagtccatttaccggtgagcgtaatcttccgccagaagtcatggccaatattgaggcaaaatatcacctcaacgatcctatctataagcagtatttcaactaccttggccaattggcgcaaggtgatttggggccttcattcaaatataaagattataccgttaacgatttggtggccgcgtctttcccggtttccgccaagctcggtcttgcggcctttattttggccgtggtgttgggggtgagtgccggcgttattgcggcgttgaatcagaataccaaatgggattatacggtgatgggctttgccatgaccggggtagttatccccagtttcgtggtggcaccgctgttggtgctgatttttgccatcatgcttaaatggttaccgggtggcggttggaacgggggcgcactgaaatttatgattctgccgatggtggcgctttctctggcttatatagccagtatcgcgcgtattacccgcggttcgatgattgaagttctgcattccaactttattcgcaccgcgcgagccaaaggtttgccgctacgtactattgtattccgccacgcattaaaaccggcgctgttgcccgttctgtcttatatggggccagcgttcgtgggtattattaccggctctatggttattgaaaccatcttcgggttgccggggattggtcagctgttcgtaaacggtgcgttaaaccgcgattattctctggtgttgagtttgacgatactggtgggcgcgttaaccattttatttaatgcgatcgttgatgtgctctatgccgttatcgatccaaaaatccgttactaacactggagctggcctattatgttgagcaaaagaaatagcgaaacgctggaagctttcagtgaaaaactggaagtagaagggcgtagcctttggcaggatgcccgtcgccgttttgtacataaccgcgcggcgatcaccagtttggtggtcttgatgttaattactttatttgtgattctggctccaatgctgtcgccatttgcctatgatgataccgattgggccatgatgtcggccgcgccgagctttgaatccggccactattttggcaccgattcctctggccgtgacttactggttcgtgttgccatcggtggacgaatctcgctgatggtcggtgtcgcagcggctctggtcgccgtggtggtcggaactttgtacggttcactctccggttatctgggcggaaaaatcgactccctgatgatgcggttgctggaaattctgaactccttcccgtttatgttcttcgtgattctattagtgaccttcttcggacagaacattttgctgatctttgtggcgatcggcatggtttcctggctggatatggcgcgtatcgtgcgcgggcagacgctaagcctgaagcgcaaagaattcattgaagcggcgctggtgggcggcgtatcaacccgcaatattgtggtgcgacatatcgtccctaacgtattgggcgtggtggtggtttacgcttctttattggtaccgagtatgattctgttcgaatccttcctgagcttcctcggattggggactcaggaaccgttaagtagctggggcgcattattgagtgatggagccaactcgatggaagtctccccttggttgctgatgtttccggcgggattcctggtgattacgctattttgtttcaattttatcggcgatggcttgcgtgatgccctcgacccgaaagatcgctgaggaatattgccatgtcgattacgaataatcagtctgccaatccacagtccgttttattggatgtgaaagacctcagtgtgactttctccacgccggatggcgatgtgacggcggtgaacgatctgaacttcgacctacgtgctggcgaaaccttgggtatcgttggtgagtctggttcaggtaaatctcagaccgcatttgctctgatgggcctactggccagcaacgggcgtattggcggttcggccaaattcaatggtcgggaaattctgaatctgccggaaaaacagctaaaccggatgcgggcagaggaaatctcgatgattttccaggacccgatgacatcgctgaatccttatatgcgcgtcggcgaacagctgatggaagtgctgcaactgcataaaaagatgagcaaaagcgaagcctttgaagaatccattcggatgctggatgcagtaaaaatgccggaagcccgtaaacggatgcggatgtatccccatgagttttctggcgggatgcgtcagcgagtcatgattgctatggcgttgctgtgccgtcctaagttattgattgctgatgagccgactactgctctggacgttaccgtacaggcgcagattatgacgctgctgaatgagctgaaaaacgaattcaataccgcgattatcatgattacccatgatttgggcgtagtggccggtatctgtaataaagtattggtgatgtatgctggccgaaccatggaatacggcaaagcccgcgacgtgttttatcatccaagtcacccatattccattggtttactgaatgcggttccgcgtctggacgctgaaggcgaatcgctgatgaccatccccggcaatccgccgaacctgctgcgtttaccgaaaggctgcccgttccagcctcgctgtcagtacgccatggaccgttgctcaaccgcaccggaattggagcattttggtgaagggcgcttacgcgcttgctttaagccagtgggggaattggtatgaatacagtgacagataagcgcgttttgctcgaggtcgccgatctgaaagtgcacttcgacattcaggatggcaaacagtggttctggcaaccgtcgaaaaccctgaaagcggtggacggcgtgacgctgcgtttatacgaaggggaaacccttggtgtagtgggcgaatccggttgcggtaaatcgaccttcgctcgcgccattatcggtttggttaaagcgaccggtggcagcgttgcctggttagggaaagatttgctgaatatgagcgacgccgagtggcgtactacgcgcagcgatattcagatgattttccaagacccgctagcgtcattgaatccgcgaatgactatcggcgaaattattgccgaacctttacgcacctattaccctaaaatgccacgtcaggaagtgcgggataaagtgaaggccatgatgttgaaagtgggcctgttacctaacctaatcaaccgttatccgcatgagttctctggcggtcagtgtcaacgcatcggtattgccagggcgctgattctggagccgaaactggttatttgtgacgaaccggtatcggctctggacgtatcgattcaggcgcaggtggttaacctgttgcagcagttacagcgtgagatggggctgtcgttgatctttattgctcacgatttggcggtggtaaaacacatttccgatcgcgtattggtgatgtatctcggccacgcggttgaactgggtacctacgatgaggtgtaccacaatccgcagcatccctatactaaagcgctaatgtcggcagtacctattcccgatccggataaagaacgggacaaagtgatccaactattggaaggggagcttccttcgccgatcaacccgccttccggctgtgtgttccgtacccgctgcccgattgccgggccggaatgtgctaaaactcggccgttgctggaaggcagcttccgtcatgcggtttcctgcctgaaagttgatccactgtaatcattccggcggaatatcattgagaaaaaaaagccctgttagttcaattgctaacagggcttttctataggtaaggtagttcattagcctgagactaaatgagtgcctgacttactctttccacagaatatggcagagtttatggtctttttctcggcacaacagaacgcgggcaaagacgtcattaaccggttcgccttcgctctcggccagaccgatgaccacttccgcgaaaaaatctggattcaggtcaaaatcgacgtgctcactccagtcttcggcgggatcgaaaagctcagccgcaccgcgttcctcaaactgcaaattgaatagcagaatatctgccggatccagattgtcgcctgccagctcaagaaaaatatcgtaagcctgttccagcgtttcgtcttcgctcaggcggttgttgaggtccataatcgtctggtccatgtgcaggttcccattagtcatcgcaatattgcccacattaaaacattctctttgcgccttttacacactttatagcgcttattgccaataactaagaatttctacaatacgataatcattactaagcaacattattacaggaatggactgaagaaatagaacagacgctccatcacccgatgccagagtggccgtttggcccaaacttcaccgtccaacaacgttgagcgagcgatataatcgtcctgaacctgagacaaatcattaccgaaaccggcatcatcgatcaccaacgtgatctcaaaattaagccacaggctgcgcatatccagattgaccgtaccgaccagacttagctgtccatcgaccaaaacgctcttgctgtgtagcaaaccgccttcaaactgatgaattttaacgccagcctccagcaattcggcgaagaatgcgcggctggcccagcggaccatcatggaatcgttgtctttcggaacgataacactgacgtctacgccgcgctgcgccgcggtgcaaatagcgtggagcaaatcgtcgcttggcacgaagtagggggtggtcatcaccaattgttcacgggcggcataaaccgcggtcagtagcgcctgatgaatcatttcttccgggaatccagggccggaagcaataacctgaatggtatggccggactcctgttcaaacggcatgatattggcatcgggcggcgggggtaaaatacgttttccggtttcgatttcccaatcacaggcataaactatgcccatagttgttgctaccgggccttccattcgcgccatcatatcgatccattgacccacacctgcatcctgtttaaagaaacgcggatcaaccatattcatactgccggtataagcgacaaagttatcaatcagcaccaccttacgatgttgacgtaaatccattcggcgcaagaatacgcggaacaaattcactttcagtgcttcaaccacttcaattccggcgttgcgcatcatagcgggataagggctgcggaagaaggtcacgcttccggcagaatccagcataacgcggcaatgcacgccccgacgagcggcggccattaaggattcagccacctgatccaccagtccgccgggttgccagatatagaaaaccatttcaatattatgttgagccagatcgatatcgcggatcagcgctttcagcgtgtcatcggtggtggtcaacaactgaagttggttgcctttaacgccgctaatgccttgacgacgttcgcaaagttggaatagcggcgcggctacctcgctgttttcggtggcaaagatatgctggcattcttttaattcacttagccaatgagcggtggaaggccacatggccttggcgcgttcggctcgtcgtttaccgagatgcagctccccaaacgataggtaggcgataatcccgaccaacggcagaatatagatgataagcaaccaggccatggaggaaggtactgcgcgtcgcttcatcaggatacgtagcgtaaccccggcaataagcagccagtagccgaagaaggagagccaactgattacggtataaaatgttgtcataaaagcgagaagtcctgttcgcaaacgttcatcactgagtgtacgcacagtaatgaaaaggggaaaccattaactcgatatattcaactataaattctttcagttaaaaggacttgcgtccatttgtgttcttataatcttagcgggtttctcgtcaagcgtgaataaacctgcgatggaataagataactacgaattcctatttcctgcggacaagtacttggcggctgagccgaaaggtctataatgagccggttctcagctttggaagaatagtttcatgagacgtagtaaaaatgaagttggccgttggcggatgcttcggcaaaatcaacgtcggcgtaatcgctggttggaagggcagtctcgtcgttatcgtcatatatatagcgtgcgccagattcacgtaaatcagcatcgccgggcgttgttgtttagcgtggcttatgagtggcagtaaatgacgagaataataagaacggtccctttgtggggctgtttttatcttgttttaatatatcttacaaatagactctgagtattttggcttcattttttttgcgcggaatctaaccagatgaagtgggtataacaatatttttccgatatttcttgaacggatttcacttctgagcaaagtcgcgttaatatatatacatggtcgctttgtgactagaggtcagtttcaggggtgttactgagcgatagcataaagcggccgacctttcggcgtaatatttagccatttattcaagtgttctttctttattaattctcgaattatttcctgtatcatgctgttttttatggatttaatatccaatgatgacggattcaattgcggttttatatcaatgaatgctatctgaaatattttagaattcactattcctttgtgcaagattaatctgaaggtttaatgaaatgtcaatgtccatatcagcctaaaaataaatattgctactcttttcttgtgccacggacaataaatcagacaattaacttttagcctaatctgctggcaatcgtcttcaatgcgtagccaaaaataacgttatcctagctattgttatatgttttcacctgttctattgagggcgatcaaagatgaatcaaccgcttatagtcttagacccaaaccgtgtaaagggttctacagataagtccagtttaaaatcaggtgttaattaaataaaacagaaccggtactagaacgattgaccgaaatctcgttttcatgcgtggaacgataataataaaaattagtgaagatacgactattgatctgaagccggatccggataaaccctcgacgcaactttaaaaattgagttatttcaaagccgttactgcggttatgccgtgatcatcacagatgtaattatcaaatcggtggagactggctcttccatttcagcagagagtgtattttctatgtctcgatatattttggctaaaacggttttctttggaaatttgcaaaagagtgacgcgctttacaagtatgagatttacagcgatcgggctgaaactgtgttccaaaccactatttatgctgaacagactatgactcaggggaaacacagttatagtttgtgggtacggaaagatcatcgcattttgaaggctgcgcctcacgatcttgaacaggccgtcgatgcgtgcgaggaacattgggaaaaaacctacgcgaaccttaaataatcgctgacattttgttttcacaaaaacactgttattggcagacattgtgggcagctgccaataacgccggtttgagtggaaacaacatccaaggatatcaatgcaattaccgattaaaaccttaagacttctgctacgacgctttactccagatgatttcccttcttatcaggcctatcactcactggcgtcggtttatcgttatctctattgcgctccggcggatgatgccactcttcgggcaaatttactgcaggccactgaatgccgttttcaggaacagggagataccttaaccttggccgttgaacgtgtggacaccggcgagcatattggcgaagtattgtttaaactgtctaataaaccggcagctcaggctgaggttggttatatatttaatccaaagtttagcgggcagggctttgccactgaagcggttcaggccatgttgaatatcggctttacccaacatggatgccatcgtattttcgctcggttggatgcattgaatatcggctcgataaatgtggtcgagcgtttgggaatgcgcaaagaagcgcatctgatacaaaacgactgttttaacggcgtatggggcgatgaacttatttatgcgcagctcaaacgtgagtggctggctaattctgcccgtcaggattaggggaaagatatgcaggccgtgttcgctagatccttaccaactgtgtcggtgcaataataaaggaggctcgaatgttagataattactttggctctgggaatctcccaagcgatcagcaaaaacaacggctattggcggtacaggctgccttagaaattattaaacaatcggttggtgccagcgaaggggctgcttattcgcgcgttaatgacgatatgaagcacgctgtcgagtggctagcgccactggccgatgccattcaacaagccttgattgtgaagaaatagttttattctagggtcttatcagaacagcggttatcgatgagacccggattagtatgaggggtataacgccaggactcacgtaaacgggctacaatgctctattcttcgtacggttaatcagcaatacatgaataatatttaattaggattttattgcgcgctttatttaagtaagaaaaagttaattaaattggtctaatgaattcacggagagtaagactaaaacagttaatttcccacatatattatatgggcgaaagaaatgactttttaaagcagctgcagtcaataggccacacagttaatctgtcgatttaatccgccggtaaattcaaatactcatcagaatacttgtttaaaaggttttacaatcaccgattgataaacgccggccgccacatagggatcttgttctgcccaagcttgagcttcggccagactttcaaattccgcaataaccgttgaaccgctgaaacccgcggcgcctgggtcatggctgtcgatagcaggatgagggcctgcggttaataaccgcccctgatcccgtagggtttgcaaacgcgctaaatgggcagggcgaacggacaaacgctgtgccagagaatcgggtacatcggttgagaaaattaaataaagcatcgtatcaccttaaaaatcagaccgataaatgagtaataatcgaatattcatctgaccatgttcagtgattaaattcaacccgcgaacataattttggttatttgtttttactcaaccgataatggcaggttatcagtgctgaaataaaatgataattaactgtcaacagaaagttttatcattctgagatcgcagctaaaaacatcatttagtgccgattgaagcaattgtttgccattgcttattgaatatgattgctatttgcatttaaacttggcggcatcagaggatattgaatcactatgcagctaaaaaaacttttaccggttcgtcggcttacatggccagtagcattttctctcgggttgcacggcagcgttattgctgcattgctttatgtctccgtcgaggaaataaataaacaacctgaaattgaagatgcgccgattgcagtgacgatggttaatatcgccacatttgctgctccgcagcctgcggctgccgaaccggaaagtcagccggagcccgtagttgaggaaaccccgccagaacctgaagttttgccagaaccggtaccggttcctttgcctaaacctgagccagtgaaaaaggaagtggttaagccgaaacccaagcctaaaccggtgaagaaagaagtgaaaaaaccggacgtgaagaaaatcgagcagccgccaacggaatcgctgtttaaatccgatgaaccgaccgcggtgacccaagcggcgccggtgaaatctgcaccgccagcctcggtgcctggctcgtctaacactgctggtcctaaagcgctgagtaaggcaaaaccaacttatccggcgcgcgcactggcgttaggcgtggaaggttcggttaaagtgcaatatgacattgatgaaaatggccgcgtgaccaacgtgcgtatattagaagccacaccgcgtaatacttttgaacgggaagttaaacaggtgatgagaaaatggcgatttgaggccgtagcggcaaaaaattatgttaccaccattgtgttcaagattggcggtgatatggaaatgaactgattgggttatttcccataagttcgtccggttatacgtttttgcagtgtctatgtcagtatctatgtcgccttaaaaagggtcgctttggcgaccctttttaagggtagaaactgaagctaaaaagcagcgggaaatgattactgcccggagccaacttcaaaattaatctttcccgcgggcagtgggcgagatttgccttcatcatcgaccgccacgtaagtaaataccgcttcggtagcgcgataacgctgaccaataggttctgatgaaactttcttaacccacacttcgacattcactacgatggaactgcggccagttttaatgcaacgagcgtagcagcaaactacgtcgcctacggccaccggcttgaggaaggtcatgccgtccactcgtaccgtcaccactcgaccgtgagctatttcctttgcctgaatagcgccaccaatatccatttgcgacatcagccagccgccaaaaatgtcgccgttcgcgttggtgtcggctggcattgccaaggtacgaagtaccaattccccgttgggtaaaagttgctgagtcatctctgtcttcttataaaaagtaaattcatacaataatggctcgcccagaacggcgggcgagcatcaaatcaatcttaggattttttttgttctgttggcatatggcgataaatatacacgccgcttatcagggtaaagaccagcgttaatgcggttaaaccgaatactttgaagtttacccagatatcctgcggcaaccagaaagcgacatagatattagccagaccgcagaccaggaaaaacatcgcccaggccagattgagtcgcgaccatacgctatcaggcagggttaactctttgcccagcatgcgctgaatcaagggtttcttcaggattaactggctgatcagcaaggcaccggcgaacagaacgtaaattaccgtgactttccatttaataaactgatcgctatggaaggccaaagtcagtgaaccaaataccacaaccatggcggcggtgaccaaggtcattttctcgaccttgcggtacatcacccaacttatagccaaagccaacagcgttgcgacgatgagtgcgcccgaggcgacgaaaatgtcgtacatcttataaaaaataaagaagacgaccagcggtaggaaatctaaaagttgcttcattaatcaatccattttctgtacatcaagtgactataccggattcagcgatgtgagggtacagtgggcaaaccgttattatccctaattatcagccggaatgcgcgggctgccagcgttatttgcagaaacttacgattaacttatctggtagttgccagttgtcgtagaactcagcatgatggactgagactattggtttagaggtagagaagaacagatgctgaggaaatcgctccgttattggatgccgggattaaccctgttaatggcctaccagcgcgaatggctaaaaccggatattcgtgcgggtttgtcggtggctgcggtggcgttgcctattgccatcgcttatgccgagttaaccggcgtgagcgcggcggtggggctatattcctgtatcttaccgatgattgcctacgcctttttcggctcttccaggcagttaattgtcgggccggatgcggcaacctgtgcggtgatcgcggcagtcgtagcgccgttggcggcgggaaacaaagaggttcattggcagttaaccataatgatgacgctgatgatggggagctggtgtctggtggctagccggttcaagctgggcgcgctggcggatttgctgtcgcgaccgattctgaccggtttgttaaacggcgtggcaattaccattattgtcgatcagttgggcaaagtgtttggttttatgacccggccgccacagctgatagagcgggtgctggcgctgccgcacaatattctcaacagtcatttacctacgctggcgatttctatcctgactttcgccattctattcggcgtgaaatgggcgcgccccaactggcctgcgccgctgctggctatcgtaatcgcgacttttgttacctgggccggcggcttacagcagtttggcgtggaagcggtgggcggatttaacggcggtttgccgatagttagctggccggaattcaagccgggcttgctgcgcgatatggtgattccggcgcttaacctcgcggtagtcagctttgtgagtatgatgctgacggcgcgcagctttgctaccaaaaacggttacgaggtcgatgcagatgttgaactacgcgctttgggcgtgactaacatcgtttcggcgctgtcgcagggctttgccatcagcggagccagcacccgtaccgcagttaacgatgccaaccacggtaagagccaattggtgtcgattattgccgcgctagctattgcgttggtgctatttttcctcaccgcgccgttgcagtttatcccagtagctgcgctgggcgtggtgttgatctacgcggcttggtcactactgagtttcaaaggcatctggcaactgcgaaaaagaaatacgcaggcgttcagtctggcgatttttacctttggcagcgtagtgctggtgggcgtcatcggcgggattgggttggcggtattactggggttactgcagtttttacgtaccgttttccgcccgacggagcaactgttgggggtgaattcagaaggcatgattcactcgatgggtaacaataacggtattaaagcggtgccgggggtaatgatttaccgtttcaactcgccgttaacctatttcaacgtagcttactttaagcgccgcatccttaacttggtggactcaacgccacatcaggcagactgggtggtgatcgacgcggttgccagtttcacctacgccgatatcagcgtgctggcggctattgatgagctaaaacgagacttaaaacagcgcaatgtcaaattggtattggcggggcgtcgcactgagttaacgcgttggttccgcctgaatcgcttaaaaagtcaggataacgatctgattttagtaccggatttgtatctggcactcaagctgattcaaagtaaaaaacgggttgaggaacgaaccgaagcggagcaactggaaggatcgtcctaaattagttgccgagcacaaagtgacgcggtcgagggctgaccaccatgtttcttccgcctcgatttggcggtttcttttgttggtcataacattggcagtaaaaaagggcctgagcggcccttttaggtttctatatgatgacgttatgctttacgcaacaacatatataagcggaacagataaaccagcagcagtgccgagaccagattgctcagggtgctcagtaccacggtggcaatggcaggtggcagcgcggcaaggtggccggccagatagagcaaaatcagcttggctgccagccacaacattaacgccggaatcaccaaacgcacgttagcaaaggccagtttggcactggctttcattgccgcaaatacgccgattttttcgttggcgaccatcaccggagccagacataccgcgaccgcaatcaccacgcccggcacaataaacagcgccaaacccagttgaatcagtagggtacagataaacaacaataacagcagacgcggcagaatcggcaaggaaagccccaccgcctgcaatgcgctgattcggctgccctgtgagacggcagaaattagcgtcagcattccaccaaccagcagtagattaccgatcagtgcggagaaggtcgccaccgcagagactttgagcaacaccatttgctgttctggcgtcatttgcgacaccatttcgcgaattcccatggtgcttgaagaagcgatatccgtatcaccagcattcaaaatcaacaattggtctgcatcaggaataaacgcctgattcagcatgacggtaataaacgcagtcaataacgccaataacagaatggcggcgagctgattgcgaaagaaattaaaactgtcacggtacagagtgttcgccgtgataggcatgaaggctccttgggataatcgataaaaataactttcagggaaggattataccctgttatgcgcgttctgtgaccctgtgatcaacaggctacctatttcctcggcggccaattgctcaaattcttcaacaggtaacggcggtaagccgtaataggctctggctcgatcgcaggattcattgcgttggttattttcaccagaataggaaaattcatggcagggagtgggtcgatccggataaatgctacaggcgacctgttggccgatgtcaccctctagggcgacgcagcgcggcgatttgcagttagtaccgctcatgcagctaataaaaggggtgatttgctcagtcaggtcattgggcactgagccttgttcgctgcccgcttcggaccaatagaaggaaacacgaaaataggcgcagcacgcgccacagctaatgcaagggttgataacagcgctcatcttgaactcattcgctcctgtataaataaaaaatataggacagccaaccgatcacgaattcacacaactgataacgcctgacagcattacctacctccccctgaggaatcaatggttatttaaccaacagcaataaatgaaccattcacccctttcttgattcagatcaattccaacgtttttaaggaattaaataaccttacgcaaaatgttattttttaaaacgacgttaaaagttgtgatccggattggatcataactacgcatttataggtatattctgcctcactataaaccatacaaatggaatggataatgaaaaaggtatgtttgttattactggctgcggcaactctggctccgtctttggcatcggctcatcaggaaggtgattacatattccgtgcgggtacggcaacggtacgaccaaatgccggttcagatgacgtattgggacaaggttctttcagcgctgacaacaatacccaactgggcctgactttcagttatctggttacggacaacatcggggtggaattactggctgcgacgcctttccgccataaaattggtttgggcgcgatgggcaatatcgctgaagtcaaacaattgccgccaaccttgatggcgcaatattactttggcgacaaacaggacaaactgcgtccttatttaggcgtaggtctgaactacaccactttctttgatcaaaaattcaataataccggcagcgaagcaggcctgacggatttgagcgtgaaagattcctggggtatcgccgggcaggcaggtttggattatatggtcagcgaaaactggatgctgaacatgtccgtttggtggatgaatattgaaactgacgtgaaattcaaagcggcggggcaagagcacactatcaatacccgtctggatccttgggtattcatgtttggcgcgggttaccgcttctaatttatctgagcgatatggcacaaaacagaggaggcgcattgagcgcctcctttttcttatatgacttataatgattgactaagacgcgtattaattatcgaattctcatatcgtttgctacagatttgacaccgggtacggtgcgggtaatctgtacggcgcgatcagcttgctggctggagctgacaaaaccgctcaactgtacccggcctttaaaggtctcaacgctaatttcagtcgattttaggttcttctcacccagtaacgcggtttttactttcgtggtaatcactgtgtcatcgacataacccccggtgccttcggttttggccgtcggagcacaggcggatacggctaacgccattacggcggcaatacataaggctgaaagggttttaaatagcttcataagttactctccatgtcctgccaatgttaaaagaacgttcactacaaagttaatagctgaaactttaatcgtgttaaagcggtcattgtgttgagaagaaaataatgttgaaccaaaaataacgacacattcagtaccatcagcgacgccgaagtgattcggaatagggcaattgatcgttcgcatgtgcagttaagtattgattatgaatagtgattgagcaaattagtacgggcaatttggtgtggaaagagactcattaaacctaaataatgcccgatctgacggatcgggcatgccgtattaacggcgagtggcggccttcattttactgacaaatcgagatagctgcgccagcatttctgccggttgcactaaattgttttcgataattttcacgatggccgaaccggaaatggcacccgcggcaccggcatccagcgaggcttttacctgttcaggatcggaaattccgaatccttgcagcgccggagccgcatgatattcatgcagtttatccaccaaatgattgagcggttgctgcgcccgattttctgcgccggtgacgcccgcgcgggaaagtaggtaagtgtagccgcggccgtgggaagaaatctcccgcagcaggtcatcgctggcgttaggcgggcagatgaagatcggcgcgataccgtggcgcagagcggcggcgcggaaaggggcggactcttcaaaaggcacatcggcgattaataccgaatccacgccgacttctgcgcagcgttgatagaagttatctatgcctttgttgaagaccagattggcatacatcagcaggccaataggaatattcgggtgttttttgcgaatttccgccagcatttcaaaacactgggttggggtgactccggcggcaaaggctcgcagggccgcattttgaatcgttgggccatcggccaaaggatcggaaaaaggaatgcctaattcaagagcatcggcaccggcggcaatcaatgtatcaatgatcgccaatgattgggttggcgatggatcgcccagttgcacaaagggaacgaatgcgccttctttacgtgcatccagttgtttgaaaagttgctgatagcgttccatcaaatttctccccgtgctttcaaaatatcgtgaacggtgaaaatgtctttatcaccgcggccagagagattcacgaccagaatctgttttttctctggcgcggcgttaatcattttcagggcgtaggccaatgcgtgggaggattccaacgccgggataatcccttctttacgagagagagccttaaaggcttccagcgcttcatcgtcagtgacggaaacgtattccgcgcggccaatgctgttgagataagcgtgctgaggcccgacggaagggaagtccagaccggcagagatagagtaagattcttcgatctgaccttcggaagtctgcatcatcggtgatttcataccgaagtagatgccaacgcgaccatgttttaacggcgcgccgtgctgaccgctttcgataccgtgaccggcgggttcaacgccgatcagaccaacgttttcttcatcgataaaatcggcaaacataccgatggcgttggaaccgccgccgatgcaggcgagaacggcgtcgggcagacggccttcgcgcgccagaatctgcgctttggtttcttcgccaatcatgcgctggaattcccggacgatagtcgggtaagggtgcgggcctgcggcggtgcccagcatatagtgagccttttcgtagctgccagaccaatcgcgcaacgcctcgttgcaggcgtcttttagagtagaggagccgctgtgtactggaatcacttccgcacccatcaggcgcatacggaagacgttcggtgactgacgctcaatatctttggcgcccatataaatgcggcatttcaggcccaacagggcgcaggccagcgccgacgctacgccgtgttgaccggcaccggtttcggcgatgatttcagttttgcccatgcgtttggccagcaaggcttgccccaatacctgattggttttatgcgcaccgccgtgcagcaggtcttcgcgcttcaaatacagcttggtattggtgccttcggtgagattctggcacagggtcagggccgttgggcgaccggcgtaattttttaacaaatcatggaattgcgcctgaaactcaggatccaactgggcgctgacaaaagcctcttccagttgtaccaatgctggcatcagaatctgcggcacatacataccgccgaattcaccaaagtaggggttaagtctggtcattatcctgtccgttattcgtaggtttatcgggttcacccatagcaaagctattttaataagcgcgtaaggtctggaacgcagcggcaatcttgttcggatctttgattccggctgcgccagccacttctacgccggagttaaaatccagcccggcacagccaagcgtagcggcaatggcgcagttttcggcattcaggccgcctgccagcagcacgttatccaacggctgttgattcaaaactgaccagtcaaaacgttggccgctgccgcccgcgccgttgtctagcacatagcgatccacagaggggatatcgcgggcgggcagggaattaccgacgctaaccgctttccaaatctggcagcttgccggtaacaattctcgcagtttctgaatatagtcccgatcttcgttaccgtgtaactgaatcgccgctaatgccagcgcttcgacactttgctgcacggtttccagcttggcgtcgcggaatacgccgacatatttcagcggcgcggcgctgatgacggcgcgggcctgtgccatatcgatatagcgaggggaactgccgacgaaaatcaatccgccgtacactgcgccagcgctataggcggctgcagcgtcctgcggacgagtaaggccgcaaaccttgttttccccgagcaacacccgacgcactgcggcattcaggtttggttctgacatcaaagcgctgccgatcaggaaaccgttagcaaattggctcagttcccgcacttgttgataggtattgataccggattcgctgattaccgtgacgccggctggcagacgtggagccagctgtttggtgcgattcaggtcgatagacaggtcgcgcaggtcgcggttgttgatacccaccactttggctcccagtttaattgctcgctccagctcttcttcattactggcttcggtcagtacgcccatattcaggctgtgagcgacggcggctagctcccgatagcgtttgtcgtccaataccgatagcatcagcaatacggcatcggcttgataaaaacgcgccagaagaatttgatattcttcgataataaaatctttgcacagcaccggctgagtgaccgcagcgctgaccagaggcagaaaatcaaagctgccttgaaaatatttttcatcggtcagcactgaaatggccgaagcatagttggcgtaaaccccggcgatctccgccggatcgaaattctcgcgaataacccctttggagggggacgcttttttgcattccaggataaaaacggtgttatccccttgcaatgcctgatagaaactgcgctgacttggcgtcaccagatgttggaaactggacagcggctgatgtagcttgcgtgcggcgacccagatttctttgtcgcgaacaattttgtgaagtatcgtttcttgcatgatctatcctctcgctgccagtgcgataactcgctcaaaagctttgccgctatgaattatttccatagcctgatgtgcgttttgacgtaaattctcctgcccgtttaatttcagcaacagcgccacgttagccgctaccgccgccgcgtgggcaggttcgcctttaccttgtaacaacctcgccagaatgtcacgattttcttccggtgagccgccctgtaaggacgccatcggataggttgataaaccaaagtctttcggcgtcagttgataggtttggatcttaccgtttttcagttccgctacctgagtgggtgcgtggatagccacttcatccattcctccaccgtgaaccactgccgcacgttggtaacccagcactcgcagtgtttcggcaatcggcaacaccaattccgggctgtataccccgattaacgccagcggtgggcgcgccggatttatcaacgggcccagcacgttaaacagggtgcgggttttcagctgttggcgtaccggcatcgcgtggcgaaaaccggtgtgatactgcggtgcgaacaggaaacaaatccctaattcatccagcgcctgacgagattgctcggcggtcaaatccaaacgaatgccgaaggctgccagcaaatctgaagatccagaacggctagacacgctgcggttgccgtgtttggctactttcatcccgcagctagcagccacaaaggcgctggccgtggagatattaatgctgttagtgccgtcgccgcctgtgccgacgatatcggcaaaggcgtaatccgggcgagggaatggctgcgcgtcggccaagagcgcctgtgctgccccggcgatctctgccggcgtttccccccgaactttcatactgattaaagtcgccgccagttggctaggctccagctcgcctcgcacgatggcggtaaataattgctggctttcctgctgagtcagtggctcggcgcggaacagtttttcaaataaattatgcatgatgagttcctgaaaagttacgccaaagcccaggccagagtttgctcgagtaaacgagcgccctgagtggtcaaaatggattccggatggaactggtagccgcaaacccggtgagcatcgtgacgaaccgccattaccatttggttaaaatgcgcgttaaccgtcagttcggcgggaatattgctgccgaccagcgagtggtagcgggcgaccggcagtggattcggcataccggcgaacataccttgttcatcgtgctcaatcgtcgaggctttaccgtgcaggatttctcccgcctgacctacgtagccgccgtaggcttccacaatggcctgatgtcccaaacaaatcccgataatgggaagttgaccgcgtaggcgctgcaataattccggcatacaacctgcttgcgctggcgtaccggggccgggtgacagcaccagcaccggctgagacatctgttgcaagcgctcggtaatggtgtcggcggcgatctggttgcggtaaatcaccactttatgaccgctggcgcgtagctgatccaccaggttgtaggtaaaggagtcaatgttgtcgagcagtaaaatatcggccattagaaaatctcctttgcctgatgagcggtcgcgatagcgcgcaataccgctcgcgctttgttacgggtttcatcggcttcggcctgcgggatggaatccagaacgacacctgcaccggcctgtaccgtcgctacgccgtcttcgacataagccgagcgaataacaatgcaggtatccaaatcaccgtgcgcggtcaagtaaccgactgctccgccatagctgccgcgtcgtgtgccttcgctttgagcaataagctgcatggcgcgaactttgggggcgccgcttaaggtgcccatattcatacaggcctgataagcatggagaacgtccaaatcgtgtcgtagcgcgccgacaacgcgggaaaccagatgcatcacgaaggaatagcggtctactttggttaaatccgctacgtaacggctgcctggctcgcaaattcgcgccaaatcgttgcgtgccaaatccaccagcatcagatgctccgccagctctttatggtcggtacgcatttccagctcgatgcggctgtccagatctcggtccagctcgccgttggctcgacgcccgcgcgggcgggttccagcaatggggtaaatttcgatctggcgattgtccgcgtcgtatttcaaggcgctttctggcgatgcgccgaacagagtaaattcgttgtcctgcataaagaacatgtaagggctgggattgctgtcttttagcgtttgataggcagccagcggcgacggacaaggcagggagaagcggcgcgaaggcaccacctggaaaatttctccggcgcgaatcgcctgctgcaagccgctgactacctgacagtattcctcgtcggactgattgcagttcagtgccatttccggcacggacaccgctggaatcggctgcggaacctgctgcatttgttgcaccaattgcttcaggcgttgctgtaaacggtattgttcctctgtatctggcgtgaacagactggcttgtaaacgggcggtgcggttctggtgatccagtaccagcaaagtttctgccagatagaaacaaaaatccgggcagcgttgctcctgacgcagtggcggcaggtcttcaaatccggcgaccaaatcgtaggcaaacagaccgcctaacagcatggcttcgcgttcgtcggccggtgtttctaccagcgttaataactggcgcaacgcgtcaaacactgacagcgcctgtaggcgggaatcttcgtcctgcatatcgttgatcggcgggaaggtgagctcgcggccgataggacgctcttcgatttttacttgctcgggcaatgctgcatccagcagtggcagcagcgccgcgccgttgcgactcagtgcctgaatgctgacctgacgacctaacgcggtgatgcgcagcgcactatcaactaccagcaagcttttcagattttgcttgctggttatctcggcggattccagcagcaacgttgccgggcgagcgccacacagctggtggaaaagggcggttgggtcgtccctataacaggcttcagccgtgagtagttttaatgtggggcgtactgtttgcattgatttaaccctgattctgtccataaaaaagcccgcgaatgagcgggctgaagcaatctgcatggtctgatgactgatatgcgtgattacaccgcccgaaaaagggagctatgccaccaacgaagtagagaagtcatatagttgttcatcatcagtctctttatgattgcattcagtttatggggctggatcagcttaccgctgtcctcaactagcgtttttttcgctactttacttcaacttattaccgttctggctgaccgctttgtaccgagaatactcttcgatggtactttgctattactcaaccgaattattcgctctgccagtgaactcgtgtactagtaaactagttctaggggttgctgtcaacccctcgatcttgttttttaacgcgctttttcatccacccgcatcgcctttgtcaagattggttaacatctgcagcgggttagcggttatgataggccgcccagactgattcggatcctagctttgactgacaccacaattgaaccgaccgcttttaccctgtatgacctccatagccataccactgcctccgatgggttattaacgccctcgcaattggtggcgcgtgcggcatcaatgcgcgtgggggtattggccataaccgaccatgacaccaccgccggactggccgaggcggcgcaggctatagatgagcaagggttagcgctacggttgattaacggggtggaaatctcaacgctgtgggaaaatcatgaaattcatattgttgggctgaatatcgatatcagccatccagcgatttgcggtttgctgcaacagcagtcagatcatcgccatcagcgagcgatggaaatcagcgcccgtctggagaaagcacgtattcctgatgcttgggcaggggcgaaccgactggccagcggcgggcaggtgacgcgcggccattttgctcgttatctggtggaactgggattcgcgtcgaacgtcggccaggtatttaaaaaatttctggcgaaaggcaagaccggttatgtcccggcgcagtggtgtacaatagaacaagcggttgaagccattcatcagtctggcggacaggcggtaatggcgcaccctggccgttatgatctttccaccaaatggttgaaacggttgttggcttatttcgccgagcaaggcggagacgcaatggaagtcgctcagtgccagcaggcaccgcacgagcgagcccagttggcgcagtatgcgcgtgactatcatttacttgcatcccaggggtctgattttcatcagccttgttcctggattgagctgggccgcaaactgtggctgcccgctggggtggaaccggtgtggcgtgattggcccgtagaagccagccataccgaagacacgttgaacgatgaggtagagttatgagtcaatttttttatattcacccggataacccacagccgcgtttaattaatcagagcgtagacgtgttacgcaaaggcggtgtgattgtttatccaacggattctggctacgcgctgggctgtcgtctggaagaaaaagcggcgatggagcgtatttgtcggattcgtcagctcgatggtaaccataacttcactctggtttgccgcgatctctcggaattgtctacctacgcctacgtagataacaccgctttccgtttgatcaaaaacaatacaccgggtaactatacctttattttaaaagcgaccaaggaagtgcctcggcgcctgatgaatgacaaacgtaaaacgataggactgcgcgtgccgtctaaccctattgcgttggcgctgctggacgtattgggtgagccgctgatgtccacgacgcttatgctgccggggaatgattttgccgaatccgatccggaagagattcgcgatcatttaggtaaacaggttgatttggtgattcacggtggatcccttggccagcagccaaccacggttgtcgatctgaccgaatctgcgccggaagtgattcgtgaaggggctggcgacgcccgacctttccgataattttcctgaaacggtcatatttatcgggtttggcgtttgtccagacccgataatgtctcatattttttccctaaactggccgtcttctggccaccaaacgtcgctacttttctcattccgcctctatcctgagcaaatgctcacgcagaaaaggcgttattttgcccattgctgtggtggctgatgccggcagagacgaatgtgctctgcaacggtgagatttattagaatcattgggcagaaaattagtgtaaaataaccgaccacggactggcttgtgtggctgcctatagggcggatttatcgacatgcttagttctaaaatgtattccaatcagttggttagactcatttcggggtaagcgattgataaaaatatataacacgacgcctgtgaaggcgacattagaggttgctcaatgagcgagaagttacagaaagttctggcgcgtgccggtcatggttcacgccgtgaaattgaagggatcatccaacagggccgcgtcagcgttgacggcaaagtggcaaagttgggcgatcgcgttgaagtggctcagtccaccaaaattcgcctggatggccgcgttctatcgatcactgaatcggaagaagcggtatgccgggttttagcctattacaaaccggaaggcgagctgtgtacccgcagcgatcccgatggccgtccaacggtgttcgatcgtttacctaaactgcgcggttcccgttgggtcgccgtaggtcgtttggacgttaacacctcaggtttactgttgttcaccaccgatggcgagctggcaaaccgcctgatgcacccaagccgcgaagttgaacgtgaatatgccgtacgtgtctttggccagattgatgatgaaaaaatcaaacaactgagccgcggcgtacagttagaagacggcccggccgcattccgcaccatcagtttccagggtggggaaggtttgaaccagtggtacaacgtgactctgaccgaagggcgtaaccgcgaagttcgccgtctgtgggaagccgttggcgtacaggtcagccgcctgattcgcgtgcgttacggtgatatcaatctgcctaaaggtttaccgcgtggcggttggaccgagctggatttgaaagccaccaactacctgcgtgagctggttgaattggatgttgaaaccgttagcaagctgccggtggaaaaagatcgtcgccgtgtgaaagctaaccagattcgtcgggcggtaaaacgtcacactgaagtggcaggtcgtcagcagactgccggtcgtcaaggttcagcccgtaaaggctcaactcgtcagaacgcgggtaataccccctctgcgagcactccggtttcaggtcgccgcggcgcgcccgctaaacgcggatcaaaatagcggttaaccttattgccgcagtctctgtactgcggcaaattttcttcctcattcatctcttcaatattactgcctgattattcccattgcttttccaattatcatattcatacagaatcatatttataaaatgaatgtagtgttaccaatcgattccttgctgggccttaattccggcgtcaaaagcatgtttaaccggacgtaactcgcttacggtatccgccagttccagcaaatcgcgatgacagcctcgtccggtgatgatgaccgtttgatgagcagggcgatgattcaaagcttgaataacctcttccggcgttaaatagccgtagctgaccatataggtcagttcatccagcaccaccaaatccagcgaggcgtctgccagcatccgtaatccatgttgccaaacttcctgacaggcagcggtatcagtggctttattctgggtatcccaggtaaaaccggtggccataacctgaaattcgacgccgtgaggctctagcagattgcgttcgccattcggccattcgcctttaataaactgaataacacccgcacgcaggccgtggccaacggcgcgggtgacagtaccgaatgcggcggtggttttacctttgccattgccggtcatcacaatcaaaataccgcgcgtttcctgcgccgccgcgatgcgcgaatcgactttttctttcagccgctgttggcgctgttggtgacgatcgtcagacatagttgaatactttccttaaagcgactcgacggtcagattactcggcagcgccagctttgcgtcccggctgagcatcaaagctaatgccggttttgcggcggctatcatcgcccattaaatagagataaagcggcatgatttcagccggtgttttcaggttattcgggttctcttccgggaaggcagatgcgcgcattttggtgcgagtcccgcctggattgatgcaattaacccgtaagttagtagttttatactcttcggccaatacctgcatcatgccttcggtagcgaatttggaaaccgaataggctccccaaccggcgcgcccctgacggccaacgctagaactggtaaagacgagcgaaggagaagccgctttcagcaacaagggcagtaaagcctgagtaagcataaaggtcgcgttgacgttcacctgcatcacgtcttgccagatctgcacgtcttgttcggtcattggcaccacttcgcccagcaaaccggcgttgtgcaatacgccgtccaaataaggcacaacctcagcaactttctgcgcgagctgatggcaatcggcggaggtagcatgcagtaaatccagcgtcagaactctggcgggtaaaccgccggactgctcgatttgttgcttaacactttccaatttgctttcagtacggccaaccaaaatcaaacgcgcaccgtagcgagcgtaggttagcgcggcctcgcggccaatgccgtctccggcaccggttaccagaataattcggtgcgtcaaaaggtcatgtttaggttgataatgcataacaactcctctcactatcggcaggtttgcgcgatagcaggcagttaacaaagcaggataacggaagggaactcgatcgaacctaagctcaacctactgactatcttgcgcgaaaatggcgagcatcagaaaaagtcattactcctatatgcctgaaacaaaatgcattttcaatcagaaagaccctgaagatgtttttgtctgtaacaatttagaggtaatttcgtttcatttttccgctactgaataacattcattcttatatttaagagaaactaatgcaattcatcatttgcgcaagacggcgagtcaggtgttcgctagaatgcaaatactctctttcaacactgattaagaaaggcggaatgtgtggagttaatttcactgtatgggctgtttctagccaaggttatcactgttgttgtggctattggggcactggttctgctggtggtaagccttgggcaacgcaagcaaggtgcaaagggtgaattgaatctggtggatctcggcgaacagtatcgggaaacccagcgggaaatgcgtctagcgcgtatgtcatccgccgagcggaaaatctggagcaaagagtttaaaaaacagcaaaaagccgatctgaaactgaaaaaagaacgcgccaaggccggtgctattgccgcggtgaaaccttgcctgtatgtgctggatttcaaaggcagcatcgatgcgcatgaggtgacctctttgcgtgaagaaatttcggccgtgctggcggtggcgacgccgcaagacgaagtattgctgcggttagaaagccccggcggcgtggttcacggttacggtttggcgtcgtcccagttggaacgtttgcgccatgcaggcgtgcgtttgacggtggcggtcgataaagtggccgccagcggtggctacatgatggcctgtgtcgcggatcgcattatttccgcgccttttgccattattggctcgatcggcgttgttgcgcaaattcctaacttccatcgcttattgaaaaagaatgatattgatgtggaattgcataccgccggcgaatttaaacgcactctgacattatttggtgagaacaccgaacagggccgcgagaaattccgggaagacctgaacgaaactcacgagttgtttaagcagtttgtgcatcaacaacgaccttcactggatattgattcggtggcaaccggagaacattggttcggcattcaggcaaaggaaaaaggtctggttgatgccattggcaccagcgatgatttactgattgccgagatggaaaatcacgaagtgattggcgtgcgttattctcgtcgtaaacgtctgatggagcgttttaccggtagtgcggcagaaagcgtcgaccgcctgttattacgctggtggcagcgcggtgagaaaccactgctgtaagtcgattggctcactgctggcaatcagtgtcaggaataatgtcaggtaataaatagaagaaagcagggggctaatgccccctgttgttttatgacgcagggcaaaattgagatgccccaaagcggtggttaatcaaccaggtgatatttggacgacaacacgtgagccaaatgcttaaacatgttaaatacggcggtagttttcgccgtcggtaacccgtccttatccaggaagaattcgccgcgaaaaactaataccggccctttttgctctacttcagttgccaccatgccgtgcagataatcctcatgttgttggattatttcgttagcttcagtcagtaatgcctgacgttgaatcggggttgtttcaccgtacattatctttctccctctaaggtcatttctgtcgctattctactgcgggttagcgtttatccgcaaacaggctaaggtttatgcgagtgaacaaacgtttaaccttaagggattagctaaattaagattccgagttaattaggttgcgcagcggtttttatcaggtacagtgtgggattttatactactaggtggaaggttttgttgacgcaattgggctgaattaatgccctggcctctgggcgtagacaaaaatcttgagggcgtttgatacggattttaggatcgtcgggttgaggcggcgatcaaaaaacatgttgatctcctgcaaaagtaccgcaatataaaaaagagatgcagaatgccgcggtatggcgagataaaaaccttcttttagaagcaataatttaggtaaaggtaattatgggtaaagctctcgtaatagttgagtccccggcaaaagccaaaactattaataagtatttagggaatgactacgtggttaagtccagtgtcggtcacattcgtgatttgccgaccagtggttcagccagcaagaagagcgctaactcaaccgaagataaaaccaagacagaagacaaacccaaaaagaaagttaaaaaggacgaaaaggttgcgttggtaaaccgtatgggcgttgacccgtatcacggttggaaagcgcagtatgaaatcctgcccggcaaagagaaagtggttgccgagctaaaagctttagcggaaaacgccgaccacatctatctcgcaaccgaccttgaccgcgaaggagaggctattgcctggcatttgcgggaggtgattggcggtgacgataagcgttttagtcgcgtggtttttaacgaaattactaaaaatgctattcagcaagcgtttaaccaaccgggtgagttgaatatcaaccgggttaacgctcagcaggctcgccgctttatggatcgcgtggtgggctacatggtttctccactgctatggaagaaaattgctcgcggtttatccgctgggcgagtgcaatccgtagcggtacgtttggtggttgagcgcgaaaaggatattaaagcctttgttcctgaagaatactgggagctgcatgctgacctgttggccaaaggtgaaattccaattcaaatggaagtcacccatgcgcacaataaaccgttcaaaccggttaatcgcgaacaaactcatgcggcgctcaagctgcttgaaactgcgcgttataaagtactggatcgtgaagataaaccgaccagtagcaaaccgggtgcgcctttcattacgtctaccttgcagcaggcggccagtacccgtttgagctttggcgtgaagaaaaccatgatgatggcgcagcgtctgtatgaagcgggtcatatcacctatatgcgtaccgattcaaccaatttgagtcaggacgcgctgaccatggtgcgtggctatatcggcgagaatttcggcgaaaaatacctgccgtcagcggctaatcagtacagcagcaaagaaaactctcaagaggctcatgaagctatccgtccatcggatgtcaacgtgttggccgagcagttgaaagacatggaagcggatgcgcagaaactgtatcagctgatttggcgtcaatttgtcgcctgtcagatgacgccggcgaaatatgattccactacgctcacggtgcaggcgggtgattatcagttgcgtgccaaagggcgaaccctacgctttgacggttggaccaaagtcatgccggcgctgcgtaaaggcgatgaagatcgcaccttaccggtgattgaggtcggcagtgaactggatctgcaaaaactgattcctagccagcactttaccaaaccgccagcgcgttacagcgaagcttctttggttaaagaactggaaaaacgcggtattggccgtccttctacctacgcgtctatcatttctaccattcaggatcgtggatacgttcgagtggaaaaccgccgattctatgcggaaaaaatgggtgaaatcgtcaccgaccgtctggaagagaacttccgcgagctgatgaactatgatttcaccgcccgtatggaaagtggtctggatcaggtcgccaacgatcaggctgagtggaaagcggtactcgacgagttttttgccgaatttagcgaacaactggaaaccgcggaaaaagatcctgaagacggcgggatgcgcccgaatcagatggtgatgaccagcattgattgcccgacctgtggccgtcaaatggggattcgaaccgcgagcaccggcgtattcctcggttgttctggctatgccttaccgccgaaagaacgttgtaaaaccaccattaacctggtgccggaaacggaaatactgaacgttctcgaaggggatgatgcggaaactaacgccttgcgcgcccgtcgtcgctgccagatttgtggcaccgctatggacagctatctgatcgatactcaccgtaaactgcacgtgtgtggtaataacccggcttgcgaaggttatgagatcgaagaaggtgaattccgcattaagggttatgaaggcccaatcgttgagtgcgagaaatgtggctccgaaatgcacctgaaattagggcgttttggcaaatacatgggctgtactaacgacgagtgcaagaatacacgtaaaattttacgcagcggcgaagtggctccacctaaagaagatccggtgccgcttcctgaattaccgtgcgaaaaatccgatgcttactttgtattacgtgacggtgcggcgggcgtattcctggcggctaacactttccctaaatctcgcgaaacccgcgcgccgttagtggaagaattagtacgctttaaggaccgtttaccggagaaactgcgttatctggccgatgcgccggtaacggataaagaaggtaacaaaaccctggttcgcttcagtcgtaagaccaaacagcagtatgtttcgtcagagaaggaagggaaggccacgggttggacggcgttctatatcgacggcaagtgggttgaagccaaaaaataaggcagtttttgtggcgctgtgattgcagcgctatgcctgttaataaaaccagtctttgtggctggtttttttatgggctaagtaggagtagtgctttatagttttaacaatccgactattttcgaaatatgatcgacttattttttttgataatgatgagtatggcaagattgttggccattgtttttttattgttaagttctatacagcgctaagcaaaatgttatagtggttatattaaaacttttcttatcgttaaaagatattataaagtcgcttccagtactgttggcataatagcgttaatggttttttacttaataactatttggcttaccagggtgacaccgatataccaaactgtgagatgatcacagcgttcaacctaggatggtatagatatgaaattgcagcagctacgttacatcgttgaggtggtaaaccacaatctcaacgtctcctcgaccgctgaaggcttgtacacttcccagccgggaatcagtaagcaagtcagaatgttggaagatgaactgggtattcagatttttgcccgtagcggtaaacatttgacgcaggttacgccggctggtctggaaattatccgtattgcccgcgaagtattatcgaaggttgatgcgattaaagccgttgccggtgaacatacttaccctgataaaggctcactgtatgttgcgaccactcacactcaggctcgttacgctttacccaatgtgattaaaggttttattgaacgctatccgcgggtgtcactgcatatgcatcaaggctcgccgacccaaattgccgaggcagtatccaaaggcagcgccgattttgcgattgccaccgaagctctgcatctgtatgacgatttgattatgctgccgtgctaccactggaatcgcgcggtggtggtcaaaccggatcatccgttggcaggaaaagcgcacgtcactattgaagaattggcagcttaccctattgtgacctatacctttggtttcacggggcgctccgaactggataccgcttttaatcgcgccggactgacgccgcgaatcgtcttcaccgccaccgatgccgatgtgattaaaacctatgtacgccttggtttaggggttggggttatcgcaagcatggcggttgatccgattcaagatcctgatttggtcacggtagacgcccgcgatatctttacctatagcaccaccaagattggtttccgccgcagtactttcctgcgcagctacatgtatgattttattctacgttttgcaccgcacctgacccgtgatgtggtggataatgcggttgctttacgttcaaatgaagatattgaagccatgtttaaagatattaagctgccggtcaagtaagggcatcatctttattcttgagcgcgtgaatcgcatagtcgttaatcgcgtagccaccgtagaaaccgaatgctcaggccttcggtttttctttttttaaggtgaaaataaaacatccatttttactaaaaatagatattatgagtttcaaccggtcaaagattattgatataaatattatcggatattttaataattgtcgacaatcaataattaatgaaatgtttaatctgaaatgagcgttttataatagacgtaggcattatattacttattctcacctctataaattagaaagtatcttattggaggtaactatgaaaacaacgctgcaaaggccttctgttataaaatatgcaccacagtcatctgcgataaataaaaaacagactaacgatgtgcattggcgaaaaaacatgatgaagatttattccgatactatcactggggtaaaaaacatcagtggtatagaacaatgcggtattgctgaaagattggtgacgaaactaaaagaaaatggagtgatacctccagaacaagacgttatgttcaaaaagaattatttctatttgccactgtataatgaagtttcagtgcgtcaggttattgataaaaatagctcaagaatactatcaggcaaggaaccttaccctattgttttggccgacccgaaactgttttgcaatacggctttggccgcgttggctaaaaataaaagtaaagatatggacagcgagagtaatgaaaaacgatttcagaaactgggcggttgcttaactaaagagttgattaagattaattacaataaaaacccagacaaatttagatcgttggggcgttatctggcattgaaaaaaactcaatacattcgcctggacgaagtgaatccatcttctctggggaagctctatatcgccggatacggtaaaccggagggtgaaatctcaaaattgggtaaatatacgttagaaaactttaatttatcgacggccaatctggtgactaaagatctcctgccattattaaccgccgccgggctacctgttgatatcagaatgctacaaatggaaagtgccgaatccgcagacagcgaaaagcctttagctcaatatatgagtaacgcgctctctgatgctggcgtcccggccagagtgtttggttatagaggtacttctgtcctaaatgagttacatcatattcactcaacccgtgcggtgaaaaatcccatcgataataattttataaaatatgacctttatcgcgccagcgatgtacgccaagaatttttaccgcagaaaaaatcgaaaaaaatgtagataatcctattgtttactctgactatagagtgagtaaatttttgttttcgctgactgttaaatgattattctgctattttcagacattttttaaggcggcgattgataatgtggttggtaaaaaaccctattattatttgtgtatctaaaatggcgatggagtcaccgaagggtaatcaagaaaatttggtggttactcgcggtgtcaatatcactgattctacttaaaattagccggtttttctttcaacatcacattcgtggcaatcggttctgctgctaacacggtcaagccaataaaaaccaaatacgatatagactggccgatttttaatgatgagatgataaaaatgccttctcgatgaatagcatcagaatatggcaagggaaagaacgctacgggatattttcacctcatccaaccaccgtgtttaattaagatttatatcactgtcgtttaaaaaataattaaattcaattattgagataaaagagttccaccctgattcgaaaacgtcagtcgcggggtaatagatctcagtcataaacgtacgacttggaaagcgtctcggggcggtacggtagaaacaggcgttttcatttttatcagtgcgatcggtaattgtcctccatattttcctattgtcatactgaattatccttacgcaaaggatctgatttcccggtaaaaaacacctttaatcgattttacctatcgctatagacaaatgcgttgttatcagaatgttaacctatctttgtgttatatttaaatcaaaccctataaccgagcgggttattctccgccggactgcaccaatatcccaataaaaaccctctgtacagaacaacaaaggagccgctatgtcgttggatctacgaaaaacgagtatgaccacgctggtcgcgttaggtacggaatatcactattacagcttgccgaaagtggctccgctgttaggtgatattgaccggctacctaaatctatgaaagtcctgctggaaaatctattacgccacatcgatggcgatacggtacatgaagaggatctggcggccgtcgctgattggctgaaggatggacatgccgatcgcgaaattgcctatcggcccgcgcgcgtgctgatgcaagatttcactggtgtaccggccgtggtcgatttggccgcgatgcgggaagctgttcaccgtttgggcggcgatgtcaatcaggttaatccgctgtcaccggtcgatctggtgattgaccattcggttaccgttgatgaatttggcgataaagacgcctttggggaaaacgtccggctggaaatggaacgcaaccacgaacgttatatcttcctgcgttgggggcaaaaagcctttaatcgcttccgcgtggtgccgccgggcaccggtatttgtcaccaagtgaatttggaatacctggggcaaacggtgtggcaggaacagcagggcgataaacgggttgcctatccggataccttggtcggaaccgattctcacaccacgatgattaacggcctggggattctaggctggggcgtcggcgggattgaggcggaagcggcgatgttgggccaaccggtatccatgctgattcctgatgtggtggggttcaagctgacggggaaaattcgcgaaggcatcaccgccaccgatttagtgcttaccgtcacccaaatgttgcgaaaacacggggtggtggggaaatttgttgaattctacggcgacggactggccgatttacctttggctgatcgagccactatcgccaatatgtcgccggaatacggcgcaacctgcggtttcttcccggtcgatgaggtcacgctgagttatatgcgcttgagcgggcgcagcgatgcgcaaattgcactggtagaagcctatagcaaggcacaggggctttggcgtcatccgggggatgagccagtgtttaccagttcattatctttggatctcggtagcgtggaatccagtctggccgggccgaaacggccgcaggatcgcgtggcgttgccgaaagtccctcaggcgtttaacgcttttggcgagttggaaattgagggtaagaaagataaggttgagcagattgagttttcactgaacggggaaaatcatcagctggaaaatggcgctgtagtgattgcggccattacttcctgtaccaatacctcaaacccgagcgtactgatggcggcgggtttgctggctaagcgcgccgtagaaaaagggttgaaaaccaaaccttgggtaaaaacgtctttggcccctggttcgaaagtcgtgaccgagtatcttaattcagcgggattaacgccttatctggataatctgggctttaatctggtgggctacggttgtactacctgtattggcaactccgggccattaccggatccaattgaaaaagctatcaaaatcggtgatttaaccgtcggtgccgtgctgtcaggtaaccgtaacttcgagggacgcattcatccgctagtaaaaaccaactggctggcttcaccgccgttggtggtggcctatgcgttggcagggaatatgaagctggatctcacgaccgaatccttaggggaaggtcatgatggtaagcctgtgtatctgaaagatatctggccgagtggaaaggaaattgccaaagcggtggaagaagttaaaaccgaaatgttccgcaaggaatatgcggaagtctttagcggagacaagaactggcaggctattgtggtagaaagcactccgacctacgattggcaggctgattctacctatattcgccatcctcccttctttagtgatatgaaggcggaacctgaaccggtgcaggatatccagaatgcgcggattctagcgattttggcggactctgtcaccaccgaccatatttctcccgcaggcaatatcaaactagatagtccggctggccgctatttgcgggaccgcggtgtggaaatcaaggaatttaactcctacggttcgcgtcgaggaaaccacgaagtcatgatgcgcggcacttttgccaatattcgtatccgcaatgaaatggtaccgggagtggaagggggaatgacgcgacatattccttcaaacaatatcatggcgatttatgacgcggcgatgcaataccagcaggaaaaagtgacgctggcggtgatagccggtaaagaatacggttctggctccagccgcgattgggctgcgaaagggccgcgtttgttaggtattcgcgtggtgattgccgaatccttcgagcgtattcatcgttctaatctgattgggatgggcattttaccgttggaatttccgcagggcgtaacccgtaagactttagggttaagtggggatgaaaccatcagcgtgagtggaatgcagaatctgaaaccggggcaacaggtgccggtgacgctgacttacgccgatggtcgacaggaaatcgtcaatactcgctgtcgtattgataccggtaatgagctgatctacttccagaacgatggcattttacactatgtcattcgcaagatgctgtaatccgctagggtaggtaggtgacgttgtaacgaaaagggtggcaattaggccaccctttgtaggcgcacgtctaaggtgcagctctatgtgcagatgattatattgcgcgcaatacttatgatttgactaatatttatgtcgataataattgaaggataaaatgtagggataaaaacctatcggcggtaaaacctcgcctgcattatttgctgagcaaatgccccattttagccgctttggtcgccatataatgttcgtttttaggattacgacccactaaaagcggcacgcgttcaacgatgttaattccggcttcagtcagaatttcgaccttcttcgggttgttagtcaataagcgaatttctttgatatccaatagtttatagatgtcagcacacagggtgaaatcgcgttcatcggcggcaaaacccagctgatagttggcttccacggtatctgcacccaaatcctgtagcgcataagcgcggattttatttaacaagccaatattgcgaccttcctgacggtgataaatcagcactccacggccttcttccgcgatttgagccagcgcggcttccaactggaacccgcaatcgcagcgtaaactgaacagggcatcgccggtcagacattcggaatgaacccgggaaagcaccggtgtgttacctgaaatatcaccaaaaatcaatgccagatggtcgtgaccggttgccagttcttcaaaaccgaccatcaaaaaatcgccccacggagtaggcaatttggcttctgctacacgttttagctgcatgttagtgttcatattaatacatcaggctcttatacaattattgtagcgcatcctactttcagattcgcggtttaaccagtgaaacgctcgaattataactttcgctacacttgattatttatattgccataagttcaaattattagctgttcaacaaatgagcgatgaaagagagggtaacagataacttcgctatccaatcaattttacgtatattatcaatgaagtaaaaatggcctgcggctaagattaaggctgagtaaagaaaaggatatttgatgttaaacatcgcaaagcgaatcatgattgggactgttcttttattacttatgcccatagcggtctggatctccggttggcattggcagcccggcgcatccggattttggcttaaaggactttttgcgctaacggagactgtcaccgcaccttggggtatcgcgaccagcgttatcctgagcggttggtttttgtggtgtctgcgttttcgccttaaaccggcagtgggtctgctgatgatattaacgttggttattgttttcgggcagggcgtgaaatctctgattaaagaacaggtgcaggaaccgcgcccgttcgtggtctggctggaaaatcagaatcacttaaccagtgaagagttctaccagttgcctcgtaaagaacgcagcgcgatggtgaaagagcagcttcagaatcaaacgctggtaccaaaatggctggtcaaacactggcgctttgaaaccggatttgcttttccctccggacatacggtttttgcggcaacctgggcattgttgggcgttgggttgctttggccacgccgtcattacaaaaccgtcggattattaatggtatgggcgacgggcgtgatgggtagccgtctggtgctaggcatgcattggccgcaggatctgattgtcgcgaccttaattagtggtttgctggtggcactggccacgatgggggttcagcgttggatcggcccattgactattccgccgcaagagcaaaaagaaattgagcagcgagatcaacggttataatcaggggttatggaaatctgattgacggcgctattggcttttggttacagacgccccatatctttactttggcttataattgcgggcgtttctcattattttttaaatgaaagcggtaaaaagtcaaaatagcgttcaagatcgtgctttatcgcgcttcagggtttatttgcgcacagggtcagtgttaatttataacgtcatgtcgccacttttttggcataattcgtcgggtaatccggcctatgggaaagaacgtgaaatatttgctgatttttttgttagtactggttattttcgtgatatcagtcacgttaggggcgaataacgatcaggttgttacctttaactacttattggctcagggcgaataccgcgtatcaacgttattagcaacattgtttgccattgggttgatcttgggttggattatttgcggcctgttttatctacgtgtccgcatttctctgggacgagcagagcgcaaaatcaaacggcttgaactgcaactggaacaacctgctgaagatcgtcactctgcgactcagcctgctgtcagcaaggaataattctctatgttagaactgctgtttctgctgttgcccgtggctgccgcctatggctggtacatgggtcgcagaagcgctcagcaggataaacaacaggatgccaaccgcctgtctcgtgaatacgtggcaggggttaatttccttttatccaatcagcaggacaaagcggtcgatctctttctcgatatgttgaaagaggacagctccaccgttgaagcgcatcttactttaggtaaccttttccgttcgcgtggtgaagttgaccgcgccattcgtatccatcaggctttgatggaaagtgcatcactgacctttgaacaacgcctgctggccattcagcaattaggccgcgactatatggccgccgggctgtatgaccgcgccgaagacatgtttacccaactgattgaagaagctgactttcgcgttggagccttacagcaacttctggttatccatcaggccaccagcgattggatcaaagccattgaagtcgcagaaaaactggtgaagttgggcaaagataagcagcgtagcgaaattgcgcatttctattgcgaactgtcgttgcaagccatgggaagcgacgatctggataaggcgatggggttgctgaaaaaggctgccagcgccgataaagactgcgccagagtgtcaataatgcttgggcgcgttcatatggcgcgcggcgattttgccaaagccgcggaagctttacagcaagtgctggaacaggataaagaagtggtcagcgaggcgctaccgatgctgcacgattgctaccagcatttacagcaaccgcaggcgtggtctgatttcctgaagcgttgcgtagaagacaataccggcgccaccgctgagctgatgctggcagaaattctggaacagcaagacgggcgcgatgtggcacaggtatatattaaccgccagctacaacgccatccaaccatgcgggtattctatcgtttaatggattaccatttggctgatgcggaagaagggcgagccaaagaaagtttgctactgctgcgggatatggtgggcgagcagatcagaacaaaaccgcgctatcgctgccataaatgcggttttaccgcacattcgctctattggcactgtccatcttgccgcgcctgggcgtcggtcaaaccgattcgtgggctggatgggcaataatcgctgaagattgtttaccggcgatgggtggtgggcagcaaacagcagggtgagaacttttctcaccctaatcatgtcattttctatttcttcttttgcgccggtttaacgccatctttgagcaactgacgcagtttcttcaactctttctgactcagcggctgttcggaaatctcttcaattccctggttatcaatctcgctgtgatgcgttttcccgtcctttcggccagctttggcatttttggctgccggattaaaactctgctccagtcgttcacagacttcggagctgagcgaaaactgtttttccagcgcagcggctttaatcttttcttttaattccagagggattttaatggttaaggtcgatacttcgctcatcatgtcacctttaagcaggggaaagtaccaagctatgtgaggtttagcgcgctgtctagttgataacataaaattcacaaaaaattcatatgtcaaatgcaaaaaagagcgcatcggcgctcttcttgtcatagctacatgaaattacttatttcgtaatggggtgcgaaaccgctaattattgataaataacggcggtgccgtgcagcttattattgccgctggcagaggtgatctggaaagattttgcccctgcggcctgtgctttttgagccagcgcgttttccagttcggtcagagtaccggcgttgctgacagagattacgccagttttattcaaacttgctgactgttgggtgttcacgctggttgaagccatgctggtgaaagatgctagggaaagaactaaggcagaggcgatatatttgatgtttttcatgtgaaactccagtccattatgattaagtggaaggcgatgtcttccgatggactgaatgatatagcatctgaaattaatgaaaatctcaaactcctgataatctcattcaatttatttgattgataatttacctttcttgaaactgttttactttctaccggttattaactaccgaacaagactgacccaaattgacctttccgcaatgatttatacatttcgcacctctggcaccttgccgcagtcatggccgtggttatccctgtcatccttagagagataacagggacggaaatctgtaatttcccctcgacgccatgtagaatgccggcggttaatatttttgagtggctgttatagatagcacgccgttagtcgcgaaaggcagccttgattatttgcatatattacagagggtagaaacatgacgtcggatactaaaaccaataataatgactcaggatcttccccgattgtggtcgcattggactatgccgataaaaacgcagctctggcgtttgccgatcgtgttgacccgcgcgattgccggctaaaaatcggcaaagaaatgtttaccctgtttggcccaaagttggtacgtgatctgcatcagcgtgggttcgaggtttttctcgatctgaagtttcacgatattccaaatactaccgctaaagccttggctgccgctgcggaaatgggcgtctggatggtgaatgtccacgccagcggcggcgcgcgtatgatgacggcggcaaaagaagcattgttgccttatggcgcacaggctccgctgttgatagccgtgaccgtgctgaccagtatggaaaaagaagacttactcggcatcggtattgacgccgatccggccgatcacgccgagcgtctggctaaactgactaaaaactgtggcctggatggcgtggtctgttctgcgcaggaagcggtacgtttaaaacagagctgcggcagtgactttaagttggtgacaccgggtattcgtcccgtaggcagtgaggcaggggatcagcgccggattatgacgccacaccaggcgctggcggccggtgtagattatatggtgatcgggcgtccgattacgcaatcagaaaatccggcgcaaacgctgcgagatattcgggcatctttggtgaagggggcttaatggttaacgataataaccgattggtgtattcaacggaaaccgggcgcattgacgaacccgtggtcaaggctgagcgtccaaagggcgacggcatagtccgtatccaacgacaaaccagcgggcgtaaaggtaaaggcgtatgcctgattaccggcgttgatggcagtgatgaaatgctagagaaactggcggcggaattaaagaaaaaatgcggctgcggtggttcattaaaagatggcgttatcgaaattcagggtgataagcgggagctattgaagcagttattggaagctaaaggaatgaaggtcaagctggccggaggttgatatcaggataatacctgttaggggtcgactattttctgacatctctcatttattccgcccatcagtcttttatcatctgaaataatcgcttggtatgcagcaggactgatagcaacgttatttaagcaacaactttcgctgcggtttcaatcaccgccgcagcgaaagatatttcagtggatcaatcaataaggggaataaatagccttattatttacccacctgatgcccgataaccccaccaatagctgcaccacctaacgtacccagtgtgctgccagtcagtacggcaccgcccacggcgccggcaccggcacctatagcggtattacgatcgcgcttggacatattggagcaggcgctcagggataacgctaaagtaatagccagtgcggcggtagcaaatcgtttagtcataatcatcataaattctcctgacgttggcctggaatattgtccattaacacctgggctgccggacattatcccgctggagttacctcaataagtataggcagtactccaactttagctggtgggtcattttttaaagtagcggtatataaaacgttaatctgacttaaatgccagattaatgataatttgacggaaaataacccgtagaaaatagtataaatcactaataaacatttaataggtaaatagtcttaatttgacacctatcgacaggtaaaagcgaggaagtacgtaaaatcgcacgattaatcaataagaacgatagctcatgctctccaatcgatggtgacttcctgattgcccattatgtatgtaggcccaaggttatccgcatttgctgaaacctgaagtcaccgtttgttacgagcaatcctgattggttggcctttctgattaattatggacgggtttctctagccacagcagggtatccaccatattttccattttggcttctacttgtgcaatagcatcggcaataccttgattataataatgagcgccgagttcctgggtaaaaaaatccaataaaaattcggcgtcaaaatcgcctaatttgaactgatgttcgcgctccagatagcgctggattttttgcgccatgagacgggtctgttcacggttaaatacgatttccgccatcttaatctccactatttacgccgatgggatgagcctgtctgcgtattaaattgttgcacaaatgggcaaaagtcgcgctatgcggcgagaaatggcgcggcgtagtaatggcctgacgtatggcaattaatccagaatagcacagggattttgcctcgataaggctgtaaaactgaatgatacctgacagaggtcgtcatctggcggaaggtctggccgtcgggctgcgcaatacccgaatggaatcataagaaacatccattttggcccgctgccagctcggcggttaaacagctatgatagcgatcaccctataataccctcgattagtttatgattagtcatatgatcttggcactcacatttattgaatcaggagatccccatggagctttatctcgatacggcggacgtgactgcggtaaaacggttggcgcgtatcttgcctttacagggtgtgaccactaacccgagtattctggcgaaagagggaaaaccgatctgggaagtgctgcctgctctgcgagatgctctgggaggaaccggcaagctgtttgctcaggtgattgcccgtgatagcgagagaatggtggcggaggcgatgttattgtctcaacgcgtaccggggttggtagtgaaaattccggtgaccagcgaggggctggcggcaattaagaagttgaaaactatgtcgattccaaccttgggtactgccgtgtacggtgcaggtcagggattgctggcggtgctggcgggggcagagtatgtagcgccttatgtcaaccggttagatgcgcaaggtcaggatggcgtggccatggtgcgtgagttgcagcaactactgaatttacacgcgccgcaggccaaagtgctggcggccagtttccgcacgccgaggcaggttttggattgcctgctggcgggctgtcagtcggttactctgccggtagacgtcgccgaacagttgatctcaacgccggcggtacaggctgcggtcgagcagtttgaacacgactggcagggcgcatttgggtcgccgatgctgagttaactgtcctgtgaattagacactgcgctgattttggtttttcacccaataaaaacgcctcatcgttgcggatgaggcgttacgtcgtcacttgattctttgcctgtctaggcggaatatcaggctggaatctctgctaacacgggcatttccctaactttcccccctgactagggaaacgcgcatccagacaataacggtggaattcccgttcggtcatcggcattttttccggatgatgacgccgcatatgctgcagataattaccgtaatcctgcacgccaaccatcaaacgaaaactctgagcagttcgcttggcgatcagcctcatttttccccacagacttttcggctggggcatcaacggagctaaaggaacacagcgcaggatatgcagcccagatcgcgcagcggcagatttatgctggaaaattaaacttgaattaaccacgagcgacctcctcgcgtaatacaatttcgctctcatgagcggtgggttgactggatttcagcgcccgacgcaccacgaagaatgctgaaatcagcatagttaccgccactaacataaagaaagcgcagagggcggcgttaatctggttattaaacacgatagtttccatgtctttaaagcttttggccggagcaatcagtaccccttgttctacgccggttgagaatttctttgcctgcgccaggaaaccaatgctcggtttttcatggaaaatcttctgccaaccggcggtcatcgaggtaataaacaaccagatagtgggaacaatcgtcacccagacatagcgctgtttcttcattttgaacagcaccacggtgcccagaatcagcgccatcgacgccagcatctggttaccaatgccgaacagtggccaaagagtattaatcccgcccaatgggtcaaccaccccttggtagacgaaaaagccccagcaagcgacggcgacggaggttcccgccagattaccgaaccaggaacggttattggccagacttggtaccgctacgccgaccaaatcctgcaccataaagcgacaggcgcgggttcctgcatccactgcggttaaaataaacatagcttcaaacagtatggcaaagtgataccagaacgccatcatattgcggctattaaagacttcactaatgatatgagccatacccacggcgaaggtcggcgcgccaccggctcgcgacagaatggagttttcgcccacgtctttggcaatcatggttaacacttccggcgtcaccacaaatccccaactattgatcgccgccgaggcgctttccacggtagtcccgatcagcgctgccggtgagttcatggcgaagtaaacgccgggatcgatcaccgaggcgcaaatcaaagccatgatagcgacgaaagattccatcagcatcgcgccgtagccaataaagcgaatgtggctttcccgctctaccaatttaggcgtggtgccgctggaaaccagggcgtggaagccagagatagctccgcaggcaatggtgataaacaggaacgggaacaggctgccggagaacaccgggccactgccgtcaataaaccgggataccgcaggcatcttcatttccggcatagcgaagacaattccgatagccaaaccaatgatgacgccgattttcaggaaggtagacagataatcacgaggagccagtaacagccagaccggcagcactgaggcaacaaaaccgtagatcaccaatacccaggtcagggtagtgccgtgtaacgtgaagaacggtccccaataagggtgaagggcaatatttccaccgtaaataatggcggccatcatcagcacgaaaccgagcagggaaacctcagcaattttccccggacgcaggtagcgcatatacacgcccataaacagcgcgataggaatggtggcggcgatagtgaataacccccacgggctatctgccagcgctttgaccaccaccaacgctagggcggacaggataataatcatgacccccaatgcgccaagcatggtaatcaccccggcgaatgcccccagctcttgcttcgccatttcacccaacgagcgaccatctcggcgggttgaaataaacagaatcaggaagtcttgcactgccccggccatcatgacgccgaccaagatccagatagtgcccggcaaaaagcccatttgtgcggccagaattggcccgaccagcgggcctgcaccggcgatggcggcaaagtggtggccgaacagcacccatttgttggtcggaacgtagtccagaccgtcattgcgccgttcggcgggcgtcaggcggcgatcatccaactcaaagatattcttggcgataaacaggctgtagaaacggtaagcgatgctgtagcaggctaccgcggcgataactaaccagatagcatttacgtgttcgccgcggctgagtgccagcatggcaaaggcaaaagcaccgattaacgccacaatcagccagataacggcggtcttgacgtttttcatgaacaacaactcctttgttggtaggggcagagtgtgagggtgtaggtctatttgattaacgactcgttaacatatgatcttcaacgtggaagaaaagcccatagagcgaaatctgtgatgaacgaattattttaatgtcaatattgtttgcatttgctgacaaattgcgagctgacaggtttttttgactggggaagtcagtgggggaataggcaaaaagaataaaaaaaaaaccgcgggatagttggctatccacacggtttttaacgaacaacacctagtttcaggcggctgggcgggcgatcacattccgggtttccatacggacttccgcgatgacaacctcgattttatcgctctgacggtaaaccacttcaccgttgatttgtacggtgccggtttcctgactgcacaccatctcatcacgcaccgcgtgaataaatggcgcaggaataaaggcgaccgcgccgttatccagtaaacgaatgcgtaaaccaccgcgagtcacatcgataatttccgctgggaaacgggtatcggtacccgcgcttggctgtaaataacgggcgtacagccagtcacctacatcgcgctcggccatacggttcaggcggcggcgttcggccagttgaacggtaatctcttcctgcggtttttcggcctgttgaccggtaatcaccgctttcagcagccgatggttaaccatatcgccgtatttacgaattggcgatgtccaggtggcgtaagcctctaaacctaagccaaagtgcgggcctggctcgatgctgatttccgcaaaggtctggaaacgacgaatacggctatcgaggaactgggttggcaacgaatcaagatggcgacgcagttcgcagaagcccggtaacgtcagtagagcttgaggatcggcttccacttcgttggttttcagcactgccgctgcctgctcgactagggccgggtcaaaaccggtgtgaacgttatagattccaaagcccagacgctcgcgcagcacaatggcagcacagacgttggcggtaatcatgcattcttccacaatgcggttggcaatgcggcgttgctcaacgatgatatccagcacttcgcctttctcacccaacaggaagcggtagtctggacgatctttaaacaccagcgcattcttctgacgccaggcgttacgcgcgttacatacgcgttgcagcagcttgatttgctcagcgatttcggcgttctgcggctgccagtcaccttgattttccagccagtcagacacttcatcgtaaaccagcttggctttagactcgacccaggcgacagaaaatgaaatatcatcgcccagcgtaccgtcttcggcgatggtaacccgacaaaccagtaccggacggcgctcattcggacgcaaagaacacaggttatcggacagatctcgcggcagcatcgggatgttgaagcccggtaggtagttggtgaaagcacgtttacgcgcaatcagatccagctcgctgttttcgtccacgtaggaggtcggatcggcaatggcgatagtcagcaacagattgccgtcgcctttgtctgccacatgcagcgcatcgtccatatcttcggtgctggcgctgtcgatagtaacgaagttcagtgcagttaagtcttcacgctccaaaccgtcctgctttagttctgcggccaccatggttggcgcttcgcgctccagattatgacgggagagggtgacccaccacggaacgaaatgatcgtcggcatgagtgataaaggcggttaaatcagcgttgaaagcgcgatcgccttttagcggatggcggcgcatttcggctacggcccaatcaccgttttggaaatcgtgggttaactcgcgtaccggacgacaagggatagcatcccgcagcaaaggatggtctggaataatcgacaggcggtcatcttttctctgcactttaccgacaaagcgagagagaaaaggctcgaccagagactctggctcagcaatttcacgatctttttcggtatgaagagtggcgactatacggtcgccgtgcatgaccttcttcatatacggcggtgggataaagtaacttttctgcccatctacctcaagaaagccaaagcctttctcagtcccttttaccacgccttcaacgcgtggggtctgagtgtgaagttgctgtttaagctgcgccagcagcgggttatcttgaaacatatcgtccagtgaatggtgtagtgagtcgagtgattcgcggctgacagttttacgcgaatcagccgcgtcgggcaagcgtcatatcactctgatgcacaaatcccttaaataattcagggcataatgaatgccctgcataagagaaatatttctaactcaggcaatacgttgcgagcgtggctcttgccacggacgtatcaccaccggaatagatttggacgttggcgtatgggtttgatcgccaaaacttgatagcgggactaatggattggtttccggataataggccgccagattgccacggggaatgtcataactgaccagtttaaaaccgttaaccttacgggtaataccgtcattccacagcgtttcaatttctacctgattaccatccgccaaacctaaatccgccaaatcctgcgggttgataaacaggacttcccgctgcccataaacgccccgatagcgatcgtccaatccgtaaatggtggtgttgtattgatcgtgagaacgaagggtttgtagcacgaaaggcgcgttggtattgccaatctgcgggaacagactgtttggtaaaggcgcgtcgctgaactcggcttttccgctggcagtggcgaatttcaattcggcggcggtactgccgagatagaaaccgcccggctgctcgcaacgggcgttaaaatcgctaaaacccggcactgtggcggcgatatggtcgcgaatcaagtgataatcgtccgctaacgctagccagttcagtttatcgcagcccagcactgcatcggcgatggcacagacaatggcggtctccgaacgttggctatcggacagcggtttacccacgccttcagaagcgtgcaccatgctaaaggagtcctctacggtgatgtattgcgagccggtggcttgcatatctcgttcggtacgccccaacgtcggcagaattaaggcgtcggcaccggtcaccaaatggctgcgattcagcttggtgctgatatgcacggttaaatcacagcagcgcagcgcctgagcggtccgttgggtatccggtgcagcggcggccagattcccacccagggctatcaaaactttcacttcaccacgcagcatggcttccagcgcttccacggtattgtgaccggcttctctcggcggagtgaaatcaaagtgtgcggccagtcgatccaacatagcggcggacggtttttcgtcgatacccatggttcggttgccctgtacgttgctgtgaccacgtaccggacacaggcccgctcccggtttaccgagctgaccgaacagcaactgcatgttggtcatttcccgcaccgtggccacggagtgcttgtgctgagtaatgcccattgcccaagtgaaaataacccgttcggcatgctggtaaacccgtgcagcgtggcgcagctgctcttcgctcaagcctgattgttgggtgattttctgccaggaggtgcggtcgacggcggcaaagtaggcggaagagcctcgcgtatgcagatcgataaacgtctgatcgaaaatgccgtctaaccccatagagagctgctcgcgatgcgtttccagcagggctttcaccataccgcgcaccgccgccatatcaccgcctaaattcggctgataataggatgagctgatcggagaagacttcggcgtaagcagctcaatcgggttctgcgggtcggcaaaacgctccagaccgcgttcccgcagcgtattaaaactgacaatgcgcgcgccgcgatccttggcgtgacgcaggctgtgcaacattcgcggatgattggtgccgggattttggccaaagacaaaaatggcgtccgcccgttcaaaatcttccatacgaatggtgcctttacccacgccgatactttggcttagcccggtgccgctggcttcatggcacatattcgaacaatcaggaaaattattcgtacccagcattcggccaaacagttggtataaataggacgcttcgttactggcgcgaccggaggtatacaactctaactgattcggattattcatcgcgccgatgtgatgggcaatcaaccccaacgcttcttcccagcttaccgggcgatagcggtcgctgctggcatcgtagcgcattgggtgggtaatacggccttggtattccagaaagtaatcgctttgctggctaagcgttgtcacggtatgcgtggcgaagaattctggatcgacggctttgcgcgtagcctcccaactgacggctttggcaccgttctcgcaaaaactgaaggtgctgtgattatcatcaccccaggcacagccgggacagtcaaaacctttgacctgattgacccgcagcagattacggatattggcaagcgcacgtttgctgtccagcacaaaacgggtcgtagcttccagggaaccccaaccaccggctgcggcagtataaggtttgatcgatggtttgaatttcatgattaatggccgcagatgttgtttcgaataagtaaattattatttaaatacttgagaataatttgtcacaagtctagtgcggcggcgggagggcgtctaatcgaatgccgcaatcgcggcatagaggatatttatcgcggtaaaatagcgttgatttgggatgaggctaggctgtgaagcgcggctttgcgggatagcagggcgaacatcatcagttttccgggtaaaccttatctttaaattcgcataaatcttcaataatgcaggaaccacagcgaggtttacgggcaatacaggtgtatctgccgtgtaaaatcaaccagtggtgacagtcctgcttgaactcggcgggcacgactttcagcaacttttcttcaacctgatcgacattcttaccaggggcaaagtgggtgcggttacagacccggaaaatatgggtatcgacggcgatagtcggccaaccaaaagcggtgttcagtaccacgttggccgttttgcgtcccacccccggcagtgcttccagtgccgcccgatcctccggtacttccccctgatgtttttccagcagaatgcagcaggttttaatcacattttccgctttggtattaaacagcccaatggttttgatataggacttcaaaccgtccacgcccaaatccagtatggcctgcggcgtattcgccaccggatacagcttggcggtagctttattgacgctgacatcagttgcctgtgccgatagcagcaccgcaatgagtagctcaaacgggctggtaaacatcaattcggtggttgggtgcggattgttctcgcgcaggcgagtcaaaatctcgatgcgtttctgtttattcatcaggctttctcaaccattcctttgggcaccgcctcagcggcgactcgccgggctttacgggctttcattttttcatcaatcacatattttactgccagtaataatccgaggccgataaaagcgccgggcggcagcatggccagaagaaacggactatccagatgcacgatttgaacccgcagcaccttagcccagttgcccagcagcagatctgcgccgtcgaatagggtgccgttgcccagaatttcccgcagcgaaccgagaacaaacagagcgccggttgcgcctaaccccattgccagcccgtccagcgccgagagcccgattggatttttggcagcataagcttcggcgcggccaatcacgatacagttggtcacgataagcggaataaagatccctaaagactgatataaaccaaaggcataagcattaatcagcatttgaaccgtgctcactaccgaggcgataatcatcacgtaaatagggatgcgaatctcgtttggcacccaacggcgtagggctgaaacggccgtattggtacagaccagcaccaacgtcgtcgccagccccagcccaagggcgttagtcgcggtggaggagaccgccagcaaagggcacagccccagcaattgcaccagcgcagagttattcttccacaacccttgcaccatcaaattcttagcttcactcattgttcaactccgcaagttggcagggtagacagcctggctggcagggtttccataaacagcgcggtatttttaacggcgcgaactaccgcccttggggtgatggtggcaccggtaaattgatcgaaagtaccgccgtctttaatgactgcccagcgcttatcgtctttgccttcaacctgttgattactgaaacgggtaatccagtcagaaatgcgaatatcaattttatctcccaacccaggcgtttcgtgatgttccatcacccggctgccgaggactttaccttgaaaatctgcgccaaccaacagctgaatagcaccggaatagccatctggcgcggtactctctatggcggcggcaacgggcttgccgtctttacgcgccagatacaggcgatgtggcgcggtgttgcctaatgccggatcagtgacaacgtaacactcaccctgcatatcgttatcgtataactctgcgggaaccacttgatctaacaatgccttctgctgcaaggctgcctgatgagcaatggtattttgtgtcaggctgttcactacggcggtcaggccggtggccagcgcggcaaagacggccagcgtcacgccgtgacgtttcatggtagctagcatggcactctccttacttgtggccgtaaacgcgtggctgggtgtaatgatcgatcaacggcacggtgatattcgccagtagcacggcaaaggcgacgccgtccggatagccgccgtaaacgcgaattaaccagaccagcaacccgatcagtgcgccaaaaatcaggcgaccacgcggtgtcgtggaggcgctaaccggatcggtcgcaataaagaaggcccccagcatggtcgcgccagagaacaaatgcagcaatggtgaaccgaagctttccggtgccagcagccagcttaatccggcgcagacgctcaaagacagcagaaaactgaacggaatatgccagtgaatgacttttcgccacagtaagaacaggccgccggctaaaaagccaaggttaatccactgccagcctaaaccggccagaacgccgccaaatagcggttgctgtagaatttctctcgccggcaggctgcgcagcgaggttttgaagctgtccaacggcgtcgcctggctgacgccatcatagcctagctgtaaatcacgaatgctcgcgccttgagaggtgtggccggtaaaaatggtcaacagactgtcgtaaaaaccaatgctattggcttgcaggctgatcgggggcatccagctggtcatttgcaccgggaaagagatcagcaacaccacataacccaccatcgccggattgaaaggattttgccctaaaccgccatacaattgcttggcaatgacgatcgcaaaaaaggtgcccaacacgatcatccaccacggagccagcggcggcaggctaattcccagtagcaaaccggtaagtagcgcagaattgtcggccagccgcgttttaatcggctgtttacgtaaagccagcactgcactttcggtcagcactgcggttatcatggccagcaccatctgaatcaggctaccaaaaccgaagaaataggtctgagcggcgatgccgggaagacaggccagcatcaccagcaacataatgctgcgggtgctgcgctgattatgagtgaaaggggaactggctatttgtaaccctttggtgagggtgtgttgcactggcctgaatttcatgaagttacaaccataggttcgtataggtaatcaaggttcttaacgttgttgtgcgccgccgggcggggtacttgccggggaaacacacttggccattagggatatattgggctggcgcattctaccctaatcacggcaagggtaatacgtcttaattataagggtattatcccgataaaggagaaatgattaaacgatgctaatcggaaggtgattattcgcagtgtacatttctcttgcatttctgcactaattagtgacaacgcattcggtaaaaatgcacttttatttatgtggctaccggtttgttacttaaaagtaatgaaagtcgcatcaaaaaagcaaggcttgtatattaatgtaaattaactaacaccatgtatttatacgtattatttgttgattttagccttggctaaaaaaccattggtttcaggtcagattaatgtagtatgcagtgtaattatatatttgaagatctcagtaatgatgaacgaagacgtattgtttattgaagaacttattgaatggatcgaaattaatttagagaaaagaccgacgttggatgatgttgccaaaatctcgggttattcaaaatggcacctacaacggaagtttaaaagtattgtcggcctgcaactggcgtcttatatccgtggtcgggttttgactcgcgcggcggtggcgctgcgtatttctcgccgtcctatcatcgaaatttccgatgcgttgggctttgactcgcagcaaacttttacccgtacgtttaagaaacgttttggcaccacgcccaaccatttccgtctacaggataaatggaacgtagagggcatgatcccgcgctttagtttctatgagaactatacgccggagattaaacctctgacgctggaagccaaagagctggtcggtattactcgccgtctgaactttgatgaacgtaatctatgcagcggacagcatgcgtcctgcatggcaatgaaggatgagattctgctcgatttctttaaggagatgaatttcaccagccagcggatttatgcggttttctcagtcgatcctgacgagcgagatcaaagcagcttctattactcaacggcggtagataaagatcagcgccatgagttgcatggtaatagcgaaaccaacagtttcactatcccagggggggaatttctgtctatttctcatcagggtagtgcgaaggaatgcgtgaagttttcttcttatttgttcaatgaggttttgccgaagattcgagaggaagtgaagggcagcattgagatggaagtgattgaagtagagcactgtcattcggaagcgaaaatgcgtgatatcgacgtggtatatcagtatttgatttccgtagattaatccagttttcactccccgcatctgatcgttcggccatccaagtaacgggatggccgatgacgctgattttacgaagatattgctgatttttctgcggcttttttggctttgactctggcaatggctgccgccaccgccgctttacgcggatcgtccgtcgggttattcacggcttcgctgacgacgggagtggcgctgtcatcttgttgattttgcgcggcttttttggctttgactctggcaatggctgccgccaccgccgctttacgcggatcgtccgtcgggttattcacggcttcgctggcgacgggagtggtgatggcatcttgttgattttgcgcagcttttttggctttgactctggcaatggctgccgccaccgccgctttacgcggatcgtccgtcgggttatccacggcttcgctggcgacgggagtggcgctggcatcttgttgattttgcgcggcttttttggctttgactctggcaatggctgccgccaccgccgctttacgcggatcgtccgtcgggttattcacggcttcgctggcgacgggagtggtgatggcatcttgttgattttgcgcggcttttttggctttgactctggcaatggctgccgccaccgccgctttacgcggatcgtccgtcgggttattcacggcttcgctgacgacgggagtggcgctgtcatcttgttgattttgagcggcttttttggctttgactctggcaatggctgccgccaccgccgcctgacgatcgtcggttgattctggtgtagacgttgtcgcttcgcgtttttctgcctgacgtgctcgagcctgtgcttttctggcttctcgagcggcgatgatggcactgttatctggcatttcacctggttgtacgttaatcgctgtgtcggaagatttctgcgccgcaattcgctccatcgcagcctgtactgcctgttgatcgctatcggtcaatttgaccgctgcttgtttatgtcgttgttctctagcctgtttttcccgttccagacgagcctgtttggcctcaaaacgcgccttggcttcggccgctcgcgcagcctcctgatccagcgctttaatttcggctttttcttttctgtaatactgcactaacggaatattactcgggcaaacataggcacaggcaccacactcaatacaatcaaacagattatgattgcgggctttttcatgctcttcgccgcggctgaaccagtaaagctgctgtggcaacagccccgccgggcaggcatcgacacacagcccgcagcgaatacaggcttcttcctgctcgctgataccgatctcggtttcagcgggagccagaatacagttactgattttgactatcggcacatccagacttggcagcgtaaagcccatcagtgggccgcccataatcaccattggctgcgcttgcggagtaaagccagccagcgccagcagatggagcaccggcgtaccgatcctggcccagaaattgccgggacgagaaagggcgtcgccggtcagagtcacgacacgctcaatcagcggttcgccgtcgataatagctcttttgatcgcgacgacggttccaacgttttgcatcaatacaccgatggctgaggaatgcttaccgaaaggcacttcctgaccggtcagaattttagtgagctgtttggctccgccggaaggatatttggtcggtatgacgcgtaacagaatcgacgaatggccggccaacgactgcttcagggcttcaatggcttccggtttattgtcttcgatgccaatcaacacccgctcaggttgtagcaagtgaattaagatattgattccgctgaccacttcgtcggcatgatcctgcatcagtcgatcatcggcggtaatataaggttcacattcggcggcgttaatgattaaggttttaacgccgtttaaaccaccctgtaatttgcttgccgtagggaatcccgcgccgcccagcccggcaataccggcctgatgaatacgttccaacaaatcgtggggctgagcctgctgataatcgggtaggggatggcgttcacaccagcggtcttctccatccggtgtaatatgtacacaaatctcggctaaaccagatggatgcgcagtcgtgtgtggcgcaattgcagtgatcaaaccggatgtcggcgcatgaaccgggacggtgcgtccgcgcccaacggtcagcggctgacctttcaacacgttatcgcccgcttttactcgtagttcgccttccggccctaaatgctgctggagcgggataataaattgatcgggaagcggcgcaatacgcatgggtacgcggctggattgcactttcatttccggtggatgaatgccgccatcaaagtcccagattttatctttcttacgcggtgtaaatagcttaaacatgttgctccacgtcgatcaatttcactggaataatctgtgatgggacggttttcaccggaatagcgttgagatcccacttccagttggcggtcgtggtaggaaccggaatcatttcaatacaatcggttgggcaaggatcaacgcataaatcacaaccggtacagagatccggcaatactgtatgcatggcgcgggttgcgcccacaatggcatcgaccgggcaggcctgaatacacttggtgcagccaatacagttgctttcatcaataaatgccactttccgcaccggattggccagcgtttcgtcgccgtccaacggttgcggttctacgcccagtaaatcagccagtttaagcataacctgctcgccgccgggggcacatttattgattttttcgccgctgttggagaccgcttcagcataaggacgacagccgggatagccacattggccacactggctttgtggcagaagctcgtcgacctgctcaacgatgggatcttcgtctacctgaaaccggcgcgcggcaaagcctagcaccacaccggaaattagcgctagcatgctgagtgcgccaatagcaatccataacgacatcattagaatttcaccagccccgtaaagcccataaaagctaatgacatcagcccggccgtaatcaatgcaatggaggaaccacggaatggcgcgggaacatcggcgaccgccagacgctcgcggatagccgcgaagagaaccatcaccaaagagaagcccgccgcggcgctaaaaccgtaaacggctgattgaaggaaattatgtgactggttcacgttcagcagggccacgcccaataccgcgcagttggttgtaatcaatggcaaaaatatccccagcagacgatatagcgccggactggttttgcgtaccactaactcggtgaattgcaccactacggcaataaccagaatgaatgccagcgttcgtaaataaactagccccaaaggcagcaaaataaagctgttcaccatccacgcgcataccgacgccagcgtcagtacaaaagtggttgccagccccatgccgatagcggtttccagttttttggaaacgcccataaacggacacaggccaagaaatttgaccagcacaaagttatttaccagaacggtgctaacgaacaaaagcaggtattcagtcattgcggaacctaaaaaaataaaagccgcctattatccgaaattggcggcctgacgacaacagatgaaatgcagggttattgcatttttccctcgattttatggggaattagtgcgttgcggccttaaatctccgtaaaagtcccttttacccgaacagatttttgcatatagggtacaaagcaagctgctgccaacagaggccagccgagggctctcagggcaacttcatcggaaattggtgcgaaggcgaaggctttcagtgccagaagaaccgtcagcaacagccacaaaataaacagtttagggaaacggcgggaacggctgcaaaacagccatagcatccacagcgtgaagccccacataaacagcgttgtcaccacagaaaagtaccattgaagggtaaatgcctgtgagttggccataaggtattcccgcgactctggtgtgaccaccgccatagcatacagtgccaacatcaacgtagcgctgagcaaggtgacaatcagataggccattggtgccagtaaccaaccgccgattcgctgatattcttcagagtgagacatgacaaaaccttattcttcattacgcattaatggccggataaccggccaacagatcgttagcttaacccgtagatatgcccttcgtcatctatatcaatatgatggtaggcaggcaaactacctagccccggcatggtcatgatattcccagcgtaaacccgaacaaaaccggctccggcggatacggcgcaagaagtaatcggtagcgtgaagtcacggggaacgttctttttcgcggggtctgcactgattgataacggcgttttagcaacgcacagcggcaagtgaccaaagccctgctcggtaatatccgccagttgctggcgcgccagcgggctgagcagtacctctttggctccataacgttcggctaaacggttcagtttggcttccaatgacatgtcgttcgaataaggcaatttcggtgtattagggttgtcgcaggctgccagtacgcagcgtgccagttgctcagtgcctgcaccgccggtggcaaaggcatggctaagttcgcaggcctgcgctccggcagataaggcgaaatcttgcaggaaggcaagctcctcctcgctatcggtcgggaaatggtttatggcgacgaccacaggtaaaccgtagctggcggcattatcaatatgccatttcaggttagcgcaacccttggcgagcagaggaatattgctgtcagcaatttctgctggcaaagactggcccggtttaatgtcaaaatcgccgctgttagctttgaggctgcgtaacgtagccaccagaaccacgcaggaaggagcgatgccagattggcgatatttgatattgaagaatttctccatccccatatctgagccaaaaccggcctcggtgacgacacaatctgccagttgcaggcctaaacgatcggcgagtacggatgagttaccgtgcgcgatattggcgaaggggcccgcgtgaatcaacaccggcgtttgctcgctggtttgcattaacgttgggtgaatactgtctttcatcaacgcagtcatggcacccgctacgcctaaatcatcggcggtaataggttgaccgctggtggaataagccagaataattcggccgatacgacggcgcatatcctgcaatccctccgccagcgcgagaatagccataagctccgaagcggctgttatttctacgcggtcggctcgttccacgccgtggctgccacctcccacccctacggtaatctggcgcagagcacgatcgttatgatccagtacccttggccatagaatgcgatgtggatcgatactcagccgttccatgccggtctgcgggccgaaatcctcaccgagacgttgttcgtggtaaaggcgagcgtccagtgcggcggcggccagattatgggctgaactgatggcgtggatatcgccggtcagatgaaggttgagcttttccatcggtaaaacttgcgacgcgccaccgccggcggcaccgcccttaacgccaaacaccgggccaagactcggttgacgaatacaggcgacacaccgcacgccgagtcggttgatgccttggctgagcccgatggttgtgacggttttaccttcgcctaatggggtaggtgtaatgctggaaaccaggaccaatttgccctgcggcttgtcggcatcaatacaatcgatatcaattttagccatgtgcttcccatagggaatcaaagcttcatcggctaccccaaggctgcgggcgacggcctcaataggcagcaaagcaggggcaacgggcttgttttcaatcgtcgataatttttgtgtcatggcgataggtgttcctgttatttggcggcagagcaactggctgaacataacccgtgaattatgtcatagaccggagaggaagcttggcagcaaatcaacaaaatgcgaatcaacgcgaaaaataaaaagaaactgatgtaaataaaccggggatattgcagaggacttgttttgaacatattttaaccatcagtgccgagggcgatttgttgataataatcctcaaataaaaatattaaaaaataatgtattaatagctgttaactttcattattaatgcttaataaagttttaatactattaaagaaatgaagtagatagagatagagaacaagaaaaaataaccaaaatctgtccatatcgattgtgattcccctgcctttaccctgaagcggatcgagtttatggcattaaatttatatgatgtgtttttattttaattcattaaaaacaatatgataaagaaatgggtttatgataaacccttaaagttgtatattaaatgcatgtttaaggatatgatgatgcctcgaacgatagccgatggaacattgatcaccgttagattcaaacgatgagcgaaggaacggcaatacattctaaatgatttagaacgaggtaatgatgacgcaaatatcaatgtcagatatgaaagataaagggcgtttaatcacagactggcggccggaagatgctattttctggaaactacgtggtcaatttgtagcaagacggaatctctggatttctattttctgtctgctattagcttattgtgtctggatgttatttagcgcattggcagttaatttaaatcacgtcggattttcattttcggcagaccaactgtttatgctggccgcattaccttcggtatctggcacgttattgcgggtagcttattcctttatggtgccaatttttggtggtagacgctggaccgcggtgagcacggggtttttgattatcccctgcgtgtggctaggttttgcggtgcagaaccccaagaccacctttgaaaccttcgtcattatcgctctactatgcgggtttgccggagccaattttgcttccagcatgggaaatatcagcttcttttacccgaaagataaacaagggcaggcgcttggttataacggcggtttgggcaatattggcgtaagcctgatgcaattggtggtacccattgctatttcggtttcgttgtttagcgcctttggcagcgcagggaaactgatgcccgatggggaaacgctgtggctggagaatgcggcgtggatctgggtcattccccttggcatcgccacgctactggcctggtttggcatgaacgatctggcgatgaacaaaacttccgtcggcaaacagttcggcattttgaagaaccgccatttatgggttctgggattattgtatctggcgtcttatggctcattcatcggttttgccgctgcttttgccatgctatccaccattgaattccctgaggtcgagatactctattacgccttctttggcccgtttctcggtgcattagcgcgctccgtgggcggaatcatggcggatcgttttagtggcgtattggtcaccgcgctcaattttgttgtgatggcgctactgatcctgttgttgattatgacattaccggatgctaatagtcctggctcgtttgttgcttttttcagcgtctttatgctgctgtttatcactgcagggctgggcagcggttcaacctatcaaatgatcgcggtggtctttcgtaaaagtactgccgacaaaataaaagcgcagggcggcagtcaggaagaagcggagcgtcacggcgtggctgataccgccaccgctctgggctttatttccgtgattggtgcatcgggtggcttctttattccgaaagtcatgggctcgtcattggcaatgaccggctcggtctttacagcaatgttgtttatttttgtgctttatattttatccatcacgatgacttggctggtttatggcagaagaaaagggtgttaacgtccgccataacgccagagaaaagttgttcagtgtttacaaagagggttatatgcaggaactcatttgctacaaaaaaatgccggtttggaacagtcgcacgttgcctgcgatgttccaggaaaaacacaataccaaagacggtacctgggccaagctgacgatattgcaaggcgagctgactttttcattgctcacggaagacggggaagacattgagtccttcatttttagcaaggttaaccagccgaaaatgatcgagccgcaggtatggcaccggattgcgtctttctctgatgatatagaatgccagctagagtttctctgcacgccagaagatttctatcataaaaaatacgctttgacgccgactcattcggaggttatcaacgctgcccgtctgataacaccttgtaaagcgatggatttgggctgtggttccggccgtaattcactgtatctcaatctgctcggttttgatgtggatgcctgcgatcacaacgctcagtcggtggaatttattgatgaaattattgaaaaggaagggctgcaaaacatccatacgcaggtacgtgatattaacgatctggtgatcgacggtcagtacggtttaattttatctaccgtggtgtttatgtttctcgaccgtcagaagataccggcgattatcgacaatatgcaacaatcgactcagcctggcggttataacctgatcgtggccgcgatgtctacggatgattacccgtgcaatatgcctttttccttcacctttaaacacaatgagttgaaagaatattatcgggattggactatcgtgaaatacaacgaggaccttggggctttgcataagaaagatgcagaaggcaacagaatcaaactgcgctttgccactttattagccaagaaaggttagcaaaaaatgtttgcgaagaaagattagctaaacatgtttacgaaaaagtgagttaagaataatagttagccaaacatagttagccaaggcaaacgagtgtgcgaatcaatatccggtcgagcgaatcaagggggataggctaaaaacgcaatgtcattatggataaatagcatgatgaataaacgcaatgacgctctcaaagtcgctgtgccgtatattgagcgtttgcgatagctatagccttaaaggaataaggcgcaataaaaacgctctggccactacggagcagagcgttttttcatcgtcatgatgttatttgcgattacggttttaaagcgattaacctcagcgaggtgggcaaccgatatttagcgttgatcgccgttgctttcaatcactttttgataccagaagaagctttttttacgttgacgcgcgagctgcttttggtgatcaacgtagacaaagccatactgcttctggaatccattaagccagctgagcaaatcgataaatgaccaagggtagtatccgcgtacatccgccccttgcttgattgcatcttcaatagcaccgatatgctggttgagataatcaatacgatcgtcgtccaccacttcgccatcgataataggatctttagcgcctaagccattttcggtgatgtagatcggaatatcaccataacgggctttgatattcatgatgccttcggtcagaccttgagggtagatttcccaatcccagtcggtgtaaacgccgtttggattacggacaaacttgaacagtcctttgaaaccgaattcattaccctgctggtggcctgcgcctttttgcccggttgtattaatctttagctgagtatcctgattattggcggcgatagtctcgcgcttatagtaattcaagccaataaagtcgcagatattgctgcgtaacagtgcgtcatcccctggtgcaaacctcggaactccccagatagcctgagcttgctccagcaactcggcaggatattcgcctttcagcacaggatcgtatagccagtgggtgaaaatgccttcagccagattgaaagccgccatatcttccgcagagtggctcagcggtgtatgggtttgcagcacgttcacaaaaccaatcttcccgtcgataccgcaggaacggaaagccgctactgctttagcgtgagccacaaatacgtggtgacaggcttgaatggcgcgcgcaggttcctgaacgcccggtgggtgcgcgccagtaatatatccgaaaccaatgaaacacacagtttcattgaatgttgaccagagtttgacccgatcaccgtatgactcatagcaaaggcgagcatattcttcgaaagcatcggcagtactgcgagcttcccagccgccttcatcctgtaatgcttgaggtaaatcccagtgatacagggtaatcattggctcaatgttgtgttccaacaaagcatcgatcaaatcgctatagaattttacgccggctggattgacttccccacggcccgtaggtaacaggcgaggccaggaaatagagaaacggtaacttttcattcccatttcggccatcaacgcgacgtcttcacggaagcgatggtagtgatctacggccacatcgccgttcgttccctgataggtcgtacccggtaaatgggagaaggtatcccagatggaaaggcccttgccgtcggcgtcgtaagccccttcaacctgataggcggcgctggcggcgccccagaggaaatcttttggaaaagcagacataaaacattcgctccacgtaaattgaaaatgggatcgtccaatttgttaagtttagtgtaagcggaatagatttattcctgcaaccggtttctgaaaccggttgcaggaaaatgaatgtcactttgcgcaacatcaattttaatcggtatgaagagaatttcagaagaaaacagaaaaattcagcatgtgtgggagcgatttatcaccttgtcagatgggtaacaaccgactttaaacataccagacaatccagtatgagaacctgatgctagtaagcgtttttgcgggaagaacgcataagattctgaataaatgagggggaggttaacgcgggttgagtgggatgaatcactgattattgacatctagatagctgattgagaagggcttcgcgtcaatgatttcccggtagagaggagcaatgttatatcaccgccgcaatattgaacctcatgatctttatctatcgcatcgtctatcgcgaggacggtatcacctggagaatagcgatcacatcgtgcggatttagcctgattgtccgggtggaaagggaattagctcttgttcagagtgacatcatggtgtcaaatcgatccagatttaaaatagaaaaagctaatggcgagaggataaacgatggctgaaaatattagagttgggttgctgggctacggttatgccagtaaaacctttcacgcgccgctgatttcggggactcccggcgtagaatttgcggccgtctccagcagcgatgccagtaaagtgcacgccgactggccgtcggttaccgtggtgaacgatgctcaacatttatttgacgatccgagcatcgatgtcattgttattcctactcccaatgatacccactttccattggcgcaacgggcgctggccgcaggcaagcatgtggtcgtggataagccgtttaccgtgacgctgtcacaagctaacgagctaaaacgcctggcagatgaggccggtttgctattgtcggtttttcacaatcgtcgttgggacagtgattttctgacgctgaaaaccttgctgaaggaaggtgcgttaggagatgtcgtgtatttcgaatctcatttcgatcggttccgtccggaaattcgtcagcgctggcgggaacaacccggagccggcagcggtatctggtatgacttagggccacatttgctggatcaggcgttgcagctgtttggactgccggaaacccttaatgtcgatcttggtttgctgcgtcccggcgcacagtcggtggactatttccacgcggtattaagctatcctggccaacgtgttgtgttacatggcacggtgctggcggcggcagaaacggcgcgttatatcgttcacggcactaaaggcagctatattaaatacggtctggatccgcaggaagatcgcctgaaagccggtgaacgcctacctcaaaccgattggggctatgacatgcgtgacggagtcgtgacattgtcacaaaatggcgtattggtggaacagcctttgctgacgcagccgggtaattatccagcttattatgctggcattcgcgatgccattttgggtgtaggcgagaatcccgtccctgcaaccgaggcgattaccgtaatggaattgatcgaactggggctggaatcaaataaacataagcaagcgttgccggttaatccccgttagcactaaccattaatacaggctatgagtaatagctttcctgcacttttgataattacgtctatcgtttaggtctattattgatggtttcctctgattgatattttttattaatcggaggcattttgattgaaggaatacagtggcatgtcttggttgcaacgcttacgtattgatacgtttttactggtattaattggggtggtgatcatcgcctcttttttcccctgtgaaggggaaaccaaagtgtggtttgaacgattgaccaccgcggccattgcgctgctgttttttatgcacggagctaaattatcccgcgcggcaatagtggccggcatggggcactggaagctgcatctggtggtattcctcagcacttttgcgctatttccgctgttagggctgggaatgaacgtgttggtgccgggaattctaacgccaacgctgtatttgggattcctgtatcctgtgcgccttgcctgccacggtacaatcggcgattgcttatacctcggttgcaggtggaaacgtggcggcggcgatttgtagcgcctcggcgtccagtattctcggcgttttcttgtcaccgttgctggtgggcgcgctgatgcaaactcagggcggcagtacagataccttgcacgccattggttctatcatcatgcaattgatggtgccgtttatcgtcggccatttgtcccgcccactgatcgccaaatgggtcgagcgccataaaaaactggtcaatataactgaccggtcatcgattctgctggtggtttatgtggctttcagcgaagcggtggtggaaggtatctggcatcaaatcgacggctggtcgctgctggcgattctggtgtgttcgctggtgctgctggctatcgttattgtagcgaatacgctggctgcgcgttggctaggctttaataccgccgatgaaattaccattgtgttctgcggctcgaagaaaagtctggccaacgggattcccatggccaatgtactgttcccggcttccgtggtcggcgtaatggtattgccgttgatgatattccatcaggtgcaattgatggtgtgcgcggtgctggcacagcgttacgctcgtcgagtggcgcgtgagcgggatgcgagcgaaaaacgggagcagggcgaagcctgagttcactcatttatccactgatttaaatcataaaaaagggtcagatcatttccggcccttttttttattttatcgttttcacctgatgcgggtttaccgagctacacaggcaaagccgttaaccacgaattttatcgcgcagcgcctgcttttccgcttcactgataaaggccatcgtcaggccgttttcctgagcctgacgaatttcatcacgagtcaggcccgctgcaggagctgctacgtggtactcattggtaatttcaatcccctgaaccgccggatcgtcggtattgatggaagccaacacgccgtgacgcaggaaggtcgctaacggatgtttggctaaggaaaccacggtactggtctgaatattggaggtcaggcaggactcgataccgatattgttttctgccagataatccagcaggcgggagtcatcgatagctttgacgccgtgaccgatacgttccgcgcccagttcgtgaattgcctgccaaatgctttccggaccagcggcttcaccggcatgaacggtaatgcgcaaacccgcatcccgcgcacggttgaaatggttgaggaacagcccgccggggaagccccgttcatcaccggccaaatccagcgcggtaatgccgtcacggtgagccagcagggcatccagttcttgcaggcaggcctgctcgccaaaagtccggctcagaataccgatcagacgaatatcaatgtcgcgatcgcggcagccagcctgaatcccatcaatgaccgcttcaaccacaccggcaacgggcagttggtgtttcatcgccatgtaataaggggaaaaacgcagctcggcatagtgcagaccggcgttaaccgcgtcctctacgttttcatacgctacgcggcggcaggcatctaaatcgcccagtaccgccacgccccaatccagtttttgcaggaagcttatcaggtccggttcggttttggtgatttgcacatgagggcgcagcgcttctaactcattggccggtaacgtcatattgaactgacgccccagatccagaatggtttgggcgcgaatattgccatcgagatggcggtgaatgtctgtcagaggaaggcgggaatcgatcatggatgcactcacttatatttatgaatgatatttattctgggtaaagtgcagaacagtataaaaacaaatggatgaaaacatccagtgagttgcagaaaaaagagattcagatcacacttaataagccgttttttaataaattcgttgattgacggcccaaataaggcatatgacagtgaaaaacacaccctgcgttaagcagggtgtgaggatgggggaaggtttacgatatatcagcagaaactagcgaagcctaatgattaccgatgacagcgttcaaaccatttatcagtttatccattccgatttccaccttactgcgggcgcaaccgacgttaagccgtaggaagccgcggccttcttcgccgtaggtaaagcccggcattatcgccactttttcctgctcaatcagtacttcctgcaattggcggtcgtcgatatgcaacgggcgtaaatcaatccacgccagataggtagcctgcggcggttgccagttaagctgcggaaaggcctgatttaaccgttccgcgacgtattgcaggttggcctgtaaataggcgcgcagctcatccagccagggcgcgccctgacggtaagcggcaatatgtgccaccagcgccagcaccgccggggaagacaaaccgtcgcgacttttcagcatgttgctgtaggtttcgcgggtttcactgtcgctgataaagccgtaagcgccggttaacgcgggaatattgaaggtttttgaacccgatgtcagcagcgcccaaggagattgagccacctgactccacggcgtatggggctgttctccccaggtcatatccatatgaatttcgtcgctaatgaccttaacctggtggcgttcacacagttcggccatgtgcgccagttcttgcaggctccacactttaccggttggattatgcgggctacacagcagcaggattttggtttgtgggcgcgccagcagtgcttccagatgagccatatcacagtgccagtgattatccactttatgcagtgggcaagataataactgacgctgattgcccaaaatcaccttataaaacgcatcataggcgggcgtgtgagtcacaacgtattcacccggcgcagaccagcagcgaatcaattgcgcaaccatataaatgaccgacgggccgtacaccgccgtggcggtgtcgataccgcattgaaaacgtgcctgataccaatggcgaattgccccaagaaaatcttcgtgctgccagcggctataacccagaacgccgtgctccagacgttgggtcagggcttgcagaatcaccggcgcggtagggaaatccatatcggaaatggtaaagggcagcaggtcggcgctgccaaaacggtcggcaatataatcccactgggtacaccaggtaccgtggcgatctaccggcgtggagaaatcaaacatcaggctctcactttttatcgatgagggaaaaaacaaacggggcaccggagcaccccgcagagttgtattatcgagacttattatgctgaggctatgagtgagtctaattcatctttcaccgattgcacctgagggccgataactacctgtaaattatggtcgttcaattggatgacgcccagcgcccgattggctttcaacacctctttgtccaccttgctcatatctttgacggacatacgcagacgagtaatacagttatccagcgaaacgatattctccgcgccgcccagcgcctgcaaaatagcctcgctgttataaccggatttaccgaccacacccggcgtcggtgctttttctacgctggcgctgtcactctcgcgacctggcgttttgatattgaaatgctgaatggcaaaacggaaaatcaggtaataagccacgaaccacaggctggctaccacaggcacccaataccatttggtggcggtaccgtgcagaatgccgaagactacgaaatcaatcaggtttccgtcggtattaccaatagtgacccccagcagtgccattacggtaaagcctagaccggttaacagcgcgtggatcaaatacaggaacggagccacaaacaggaataggaattccagcggttcggtcgtgccaccgatcacgcaggcgactacgccggaaatcagcaatcctttaattttatggcgattctctggcttggcgcagtgatacatcgccagcgcagcgcccggtaaacctccgaggaaggcgggcattttaccttgagacaggaagcgagtcgcactttctgagaagccgctagtggttgggcaggaaagctgcgcctggaagatagtcagcgcgccactgacactgtgaccacagacatccatcgtgccgccggcttcagtgaagcgaatcagcgccaccagtatatggtgcaggccgaaaggcagtaacaggcgttcgccgctgccgaagatcatcgggccaaaaatccccgcgccgttaatcaagcggcccaaaccgttaatgcccgcggcaaaccacggccaaatgaggggaatcaataaaccgaccagccccagtaccacggtggtaacaataggaacaaaacgggtgccgccgaagaaggccaacgcatccggcaggcgaatggtattaaaacgctcgtgcagcaggtaaacgatgatccccacgatcaccgcgcccaaaataccggtatcaatcgactgaatgcctaaaatattttggatattgtgggttttcagcaccaaggggtcggtagtcggcaatacgccgctggtggtgagatagaagttggtcgccagattcagcaccgcaaaaccgacgaaaccggcaaaggcagcaacacctttgttttcccgcgccatacctaagggaatggcaatggcaaacatcactggcaggaagctaaaggcaaaggagccaactttgctcatccaagtgaataacagctggaaagccgggtggcctaacaccggcaaaagggtaataacgtctttgctgcttaacgaactcccaatgcccagcataatgccgcagaaggacagcaaggcgaccggcaacatgaaggttttccccagactctggaaaaactcccatagcgtaattttttgtttttttaccgccgacataggtggctcctggtgtgtgaaaaaggatctgttctgtggatctttagcgtcctgaggttaaattaagataaaacgtttaacctaaataatatgcgcggcaaatcacagttattgtggcctttaacgccggtaaatgaaattctgtgagatacgcccgaaaatgccattttgtcgatagaaactcactttagctcaagctaatgataagccgagggtgaagtttccagccataacaggcacgctgatgtttaggctcaggcaggtcttcccggcttttggggcgcaggcctggacgggtgccgccagtaggtggatgagaggttaaaatcgctatgtagcgcacagatactgattaaaacgattaatcgttttacccagattattgaattgggtgtaacatttgccccgaagcatagatttgtctgccaaaggacgtgagacaaaaatgataccgaatagccgcgatgaatcataaaaagatcaccattaccgatgttgccaaacacgccggagtttctgttgccacggtctcgctggccgtcagcggcaaaggtcgtatttcaccgacaaccgccgagcgggtgaatcaggccatcgaacagttaggttatgtgcgtaatcggcaggcggctcagctgcgcggggggcattccggggtgattgggttgattgtgcgcgatatcggcgatcctttttatgcggcgatgacggcaggactcagcgaagctattgaagccgaggggaaagtgctgtttctcactcaaagcggcaaagaagggaaaggtctacagcgctgctttgattccctgatagaacagggggttgacgggctggttcttggcggcggcgcgaatcaggaaagtggcctgaaagagaaggccgagcaacagggcatcccgttgatttgtgccgcgcgtgccaacgtattggacggcgtcgacgtggttcgcccggataatatgcaggcggccaaaatggcgacggaactgctgataggcagaggacatcgtaaaattgcttatttgggcggtcacggtcattcattgacgcgggcagaacgattgggcggattttgtgccacgctggtgcagtacggtctgccgtttcgttcggattgggtgattgaatgtgatagtcagcagcaagccgcggctgatgcggcggaaagtttgcttagccatcatcccaacgttagcgcgattatttgtcatcaggcttccgtggcgctcggtgcttattttggcattctgcgcaccggcagaggaattggcagcgctggggtggatacttatctcgatcagcaggtggcattgatcggttttggcgacgtacccgaagcagaattaacagagccgccgctcacttttattaccagctcggcgcgagaaattggctatagcgccggccagcggttattgcagcgtattgccggtgtcgatttgcaattgcaaaacgttattctcccgccggtgcttattcgtcgtggctcggtgtagccggcacgattggcgctattggcacgtaacaatccatttatccttctgttccagattcgctataaacatcgcaataatcctattcaatagtcgacgataatcgtccgatcaaacagagacaccgatccctgtctcaattctgactgcctactgatgatttagatatttggttcatttttgaaagtaaaatttagcattaacagctctaatgaatctgcgtgtattattctttaaatctatagttccaatccgttttacaaaaaagtgccggatgcatttttcgatttttattaaatcaaggaggggatatgccaattattagttctccaacgttgcgccgctatttaaatttaaatttggcgactaaagaattaaaaacgctggaaaaaacgaacctgctgaaggtttcaaatgtagtaatgacatgtttgaccagtacgtcgagcagcacaaaaaatataaataaaatcaacagaataaatagcatcatagcaaagataaacgatgtcagatatctcgccgtcgtagataaacgccgtaatgaagtcagtgaagagttatccgatttgatgcggatgaaagtgacgctaaacagattaaaattcatagaacaggaaaaggctgccgcggcagtggaagccagtaaaatagccgccaaagtgagtgaggccaatcatcgtcggttaatagaacaaagtcagaaagaacacatcatcaccggtttgctttattccagcaccacaccgccaaatatgaacatcgacccagctccggttacggctgaattgcaaaaactgccgctgaatatattaaagactgcggactctttggggcagtttataacattgaccaacgataatataaccaatcacccacgaatgaacgcgctgaaaggtcaaacgccgcgtggttggaccaatggcaaaacctgggattcagtccccggagttggggctttgggtaaaggggcagaaaatgagtttcatgccgatgaaaccgtggtggcattaacgcaactcgccaatggcagctggaaattagcgacggagcatggttctgccaatctggttttgcatgaatacgcgcatgccattgatcgcagctttggtgaaaaggcaaatatgggagataaaggtcttggtgaggttggcgatagtttgagctgccgtcaaagtttccgcgatatatggcagacggagctggggtcaacctcccaaaccgatagcaattattattattggcaaggcggtagcgacggcggcgcggaagaagcatttgctgaggcctttagcgatctttacggaggaacttcccagcgtccgtggcctaatataaaagcttatattgccgcaaaaatggcatcggttaatccggagaattaatcctgtcggatagagagttatcttcgccgtactgatattgctgtcattttacctcgggcgcagctaaacccacgcttacacatctacatctatcgataatcaggaacgtggccataaaaaatgccagccctgtagcaggggctggcattaatcattatgtttcgatcttggcccaatcagcgtttacctgaggataagcgacttcttgttccgaatcgatattactctgcggcaggggcttcagcagcaggggcttcttcttcctgcggcataccgccaaacataccgaacagaccggcaaattcctgcagcgtcattttctgaccgttcagatcgattttgttatcggcgaagctgaagctgctgctgataacgtcatctttggtcgtggtcagtttgaacatctggcccatcgcggcaacgccctgaacctgctgaacggccattttagcggcttcttcagcgctgtaaccctgcaaacgtgcagcctgagtcgtgaactcggtcgccattggcattgggatggtcagattagcgtcgattttcttgatagcacgagtcaggatttcttcctggctggtgattggcgttgtcactttgcttggatcggccagcacgacgtccagtttcagggcgctttcgcctttgccgtttttccagctcagcggagagatgctgaagctaggatcgcctttcagcaggcttggcagcttggtcagaaccagctcggtcatctgcaactggtaagtttcaggatcgatgttaccggtttgcagaccctgcatagcgatttggttgtaggaggtagcgaagttcttcactgcttcgccgtccagaccggcaaaggtaaagttcagcttaccggaaccaaagtcattaccctgaattttcagggaatccagcgtgtagctcagcttaccgttcaggtttttgtccgactcgcccatctgcgaagttagcgtaaagccatcaagaaccagcgcttctttgccttccacgctcaacagaacctgtttgatcgacagattctggtcgccgatgctgagatcaaacttaccggttttgctgtcgttcttcaggctaaggcctttaacagtaaaggtttctacctgatccatttcgtttttcttgaacagcacgatgctatcgctttcgccgttcagtttaacgtcacgcatatctttagagaaagcagcgtcaaggctggcaccggagaagttcaggttcaggccgtctttctcgtaggtgatagggatcagtttgatcgcagaatcggtgctaccgttataaccaatgcgtgaatcagcggtaaacggtgatttgcctttggtgatatcaaacaaagctttaaccgcagccgtgttttccagttcggagtgaaccgacgccatgctagggatcaggttgaatttcttcaattgagccattgggaaaggaccgtgatcgatagtttcgataaaggcgatctcttcacctggcttcatcactgcattttcgccggtgatagtcccgtctggttgcaggatataacggactttactgctgaaggttccgcggtggtaatcggtataagccagtttcagaccggcctgtggcgccagtcgtttaatttgtgaattggcgttatcgacgatttcactcatccgctgttccatcaatttgccggtgtaccaagaggcacctgtccatgcagcgccgagaacgacaataacgctgacagccactaacgattttttcatggttctgttcatccttttctaattcagcaaattcaatacgttgaacgcggttgtaggcacaataacgcccataagcgcgttattgtgaatgcaatagctactgattggcaacaaataagaaagatttgtaacaccaattagttaaataatgttgtaaacccgcgcaatatgaccagaaccgcggaggttaataggggattcattggcggaaacaaagcaggattccccaggttgtagcacaatctgctgtgagtctttttgcacaatactctgtccgtcgatacaaaagataatcgccgcgctgttctgctcgatgttttccgactcgtccgtcaggcgatgaatggcaaaggcaaaatcatccacagggatcgggaagatcagcgcgttaccctgttccttcggcgcggtcagtaactccgactccggcttgggaacaaatttcacgttagcaactaactcgggaatatcgatgaatttcggcgttaacccggcgcgtagtacgttatccgagttagccatcacttccagacccacgccgtccagataggcgtgcggcgtttctgcatacaggaacatggcttcacccggctgtagagtaataacgttcagcagaaggggggagaacaagccgctatcctcagggtagatttgcgcaatgtgacgaatagtatcccacggttcgcctcgctgattattcaacgcggatttcaatacgcccagcgctaacgctttttgctcgccttccatacttaacaggctggcaaacagcagcgccagatgttcggcatccggctgaagcaggaaggcgccgatatccggatgcgccgcagacactggctgcaatagcccaactaactgctctggcgtgcggaaaccattcatagcgtggaagggcgtcagtgcataaaccagctccggtttatggttggcatctttgtaattacgctcggcggcgtctaaaggaataccggcggcattttcacgggcataaccgatttccgccgcctgtttactaggatgaacctgaatagacagtggctgagccgcacagagtactttgaacaggaaaggtagctcgccaaaacgtttagcgactgcatcccctaaatggcccgacgggtcgctgtcgataagctggcgcagtgattgtggctgcccctgagcatcgactatttttgaactgcttttaggatgcgcgcccatccacaattccgccatcgggatatgttgcggattaggaatgccataaagacgggtcagggcgtcggtactgccccaagcgtagttttgtactgcattgatcatcttttgcatgattgaggtctgctgtctcagcggctgaaaggaattcaggccagattaaaaatataagctagtaaacaatgaggttagatgggttgcaaggattgcacaccgggaattatgctttttgccgtaaatttgcgcgacgatcccattgggaaggatagcaaggatgggaagtcatctgtgttcttggcgctgatattttggtcgttttagcggctaaaaactgcggtataaaaagaaggtttcccaacaatcgataacttggatagatactttggcaatgaaacttgttaaagaaaatatagattcatgaaccccagcgtattaccgccaaactgctggtgggcaataggcaataggcggtgagcggaaaatcggccgtttacaaaaaatcaacataaaagttatctcccaaacctacaataaaggcgtcccggtcgcataatcagaatgattgttatggcatgataatcattatcatcagcaactattattgctgatgttcgatacctacttattccgctatctgtgctaaggagagagtcatggcagccactcgcattgaaaaagactcaatggggccaatagaagtacccgccgaccacctgtggggggcacaaacgcagcgttcactggagcatttccgtatctcccaggagaaaatgccgaccgcgcttatccatgcgttggcgctgaccaaacgcgctgccgctaaagtgaatatggatttaggactgctggctgaagagcggggcgtcgccattattcaggccgccgatgaagttctggcggataagcaccctgatgaattccctctctccatttggcaaaccggttctggcactcagaccaatatgaatatgaatgaagtgttggctaatcgtgctagcgaaattttgggtggagccagggggaatgcgcgactggttcatcctaatgatgatgtgaataaaagccaaagttccaatgatgtcttcccgacggcgatgcatgtcgcggcggtactttcgctgcgtgaacatctgttaccggagctgaaagtattacaaaaaacgctagcggataaggccgaagcttataaaagcatcgtaaagattggtcgcacccatctacaagacgccacgcctctcacattggggcaggaaatttccggttgggcggcgatgctaaactacagtctgcatcatatcgaagcctcgattccccatatctgtgaactggcgctagggggaacggcggtagggactggcttgaacacccatccggaatatgcagtgcgtgtggctcaggagctggcaaatctgacccaacaaccttttgtcaccgcgccgaataagttcgaagcgctggcgacctgtgacgcactggttcatggacacggtgcgctgaaaggtctggcggcctctctgatgaaaattgccaatgatgtgcgttggctttcttccggacctcgttgtggtattggcgaaattgctattccggaaaacgaacccggcagctctatcatgccgggtaaggtgaatccgacccaatgtgaagccatgactatgctgtgtgctcaggtgatggggaatgatgttgcagtgaatattggtggcgcgtccggtaactttgagctgaatgtgttccgaccaatggttattcataactatctacagtcaattcgtttgctggctgacggtatgcgtggctttaatgagcattgtgccgtcggtatcgaaccgaatcgggatcgtattactcaacttctgaatgaatcactcatgttggttacggcgctgaatacccatatcggctacgacaaagcggccgagattgccaagaaggcgcataaagaggggctgacccttaaagcggcggcgttgaaactggggtatctgacggatcaacaattcgatgaatgggtaaggccagaagagatggtaggaagtatgaaggattagctcttccttaagctaaggatataagaagtaatgataaaagcgttggcggtgggaaagctgacgcttttcagttttagatgaccgcggttggtttaaggcagggttccggtcaaattccaaatagtcccgctatccatactttggttcaatacggaaacggaggcattcactgcgcctttttgattgataggatcggtgatcgtttgaactgaatgcgcgatcatggcagcagccaccgtgccggttcctatttgaacttgaatattggcatctcctgccgccgtccttccttgcatgtcgagacgggcactgcccacagtatgtaaagtcccagggccacggccaaggtcggcataatcaagcataaggataactgcctgacaatcttttcgttgtgcggaggtagggttaacaattccgcgaataggattttgagtatttgtcttagttaatggcatagtataccttccaattctattaggattatggcattgcgctgtgaaacgctgtgaaaatataaataatatcgagctctattaacccggaattataaatatgcctgattctggttataaaaataaaaaaaacacgaaagatttagctgcttaaataaattaagagtgaacattgtgttaatttgtttcttatgtgattattcaatcggctatattgtttcttgcgaatatttaaaatatcgtgtgacagactggattggttagcctgctactattttatctttaagaatcaaactaaaatcatttttatcacacaattaattatctatattctgtgtgatgagtattaatcatagcaataaacaataagactgccagagagtaagcgatatttttttcatcgcatcattgcgcgtaactaaatgatttaagttacggctgtttttggataatgggaaaataacccattgttttttataagcggaaaatccgctgagtcattcgatatctgtataaagatgcagtcgtggaattaacaaccgcaacggtttagcctgcggtttatgtttgtgtttaatctgtgtggcatcgtaattgggtagctctccaattttaggcataccggcacctaactctttttggcataaagcaattaacggcataggacagggatgctgcacctgcttttgctgttcctgataccagacacgggcaatgggctgaaccttgacagggcgtttaattttcaattttgcagtttcgggtaatctttgcacgtcggcaatttcttgacttacccattcggcccattcttctttggtaaagggcggcacggcgcgaccggcattcaggctcttatttagctgcgccagcaaatcttctttggttatatttttaattatattcttatttgcccagccgaatcgcactgaacttggattaatcaatggggtgagggtgcggtaagtatttagcgtaatcaggccgtgcaggtgagtgtgaacgaattcaaagcgttgctcgctgggcaggccggactcaacggtaataatctgctctaactggtgtttcaattgattaatatgttcaatcagggtgatgcagtcccgatattctgtcttattcaatgcgaaacacagtacgccggggaggcgaacggccgctttgctgctgacattttgcttattatgatgaataaacaggcgacggaagtgctgtaaacccaattcgcgggcttcttctccgactactggcgtgacgttaatctgttcaatctcttcatgctccaagcctttttcgatatcgggcagggtgaagacttgggcggccaataatggaaactctgccagctgctggtggagcgacgccaatgataattccagttggttaaaactggtattcattctcaaaatcaaatcgtacttatccatagagttatctcgttaaaaacacgctttagttacaacatacattaagcttcttgcaaacaacagtgcgcattcaagcaaaagtgcaaaaacattaaggacagagctaaattcttcatgcagaacgaaggggggccgtgggcagaattatgattttactaaacggttatattaattttttcataaggttagctttatgctggccgattagtgtagcagaatacgtgggggactatcgggcgaatatgtctgacttttcgatatgaacggcttatcggtatttctggatgctcgctattttttgatcgaactgatgttgattatttattccctagaaaataatcccttagatgtgaatctgggtaagcaggctctggttaacgcccagagccacgaagataaatattcaacagttaaatacgcgcagcttcaggtaacacacgtaaacgttggccgacggccaacgcaataagcaacagcagcgcgataaacccggtaacgccgtaccagcccaaattcagccagaatatgcctcccaaggtgcccgcgacgctggaaccggcgtaatagcagaataaatacaaagaagaagcctgcgctttggcgcgtctggcgcggcggccaatccaactgctggcaaccgagtgtgctgcaaagaaaccggcggtaaatatcatcatcccaatcaatatggcgataaccgatgaaaatgcagtaatcagcacgccacccagcatcaggccaattgaccagagcaatactggcccacgtcccaaacgcgtggtcagggcgccggctttaggggaactgtaggaaccagtgagataaacaacggacagcaggcctaccagcgcctgactcatcccatagggttcccccaataggcgatagccgatgtagttaaacaaggtgacgaaactgcccatgatcaggaaaccctcggcaaacagcagcggcagaccggaatcgcgccagtgcagtttgaagttaatcgccagcgttctggggcgtagcgaagtggcacgaaagtgtcgggaaggtggcaaaatacgccagaacatgaaagcggcggccaacgcaaacagcccaatcaccgccagcgctacccgccaggaaaagaaatcgcttaatacgccggcaatcaggcgtccgctcattcccccaatcgagttaccgctgatatacaaccccatcgacagcgcgacaaaactgggatgaatctcttcgcttaagtaggtcatggcaaccgccgccacgccgctgagggataaaccaattaatgcgcgcattaataatatgccgtgccagctggtcatcaaggcacataccagggtgcagatcgctgccagcatcaatgacaccaccatgaccggtttgcggccaatcgcgtcggaaagcgggccggtaaacatcaatcctaccgccagcattccggtggcagtggataaagacaagctgctactggcgggggagataccaaaatcttgcgacagcaaaggcaaaataggttgcacacaatacagtaaggcgaatgtcgccagtccggcggagaaaaaagccagcgtgacgcgaataaactgcggtgtgccgcgttggatataaggacgtttattaatcggtaaagtcgaggtgtggcgggcagaggcagtattatcattagctaccggtgtcggcgctacagaattcgcagagcgcaaagaggtgttcactttcattccttatccaaaaaaccacactaaaacaggctgtttgccccatagaaagggggaacacagtgatcataggaatagcgcagttttttgtctaatatattaataattgggaataagacgtttaacctattaatggattttcatgccaatcgaactcagacacttacgctattttattgcggtcgctgaagaactgcacttcggacgggcggcggagcgacttcggatttcgcaaccgccgttaagccagcagattcagattttggaagagcaaataggcgcccggttgttagctcggaataaccgtaacgtcagcctgacgcaggccggagagctatttctcaaagaggcttaccaaattttggcgcaggtcaatagcgcggcggaaaaagcggggcggctgcaccgaggtgagttgggtgagctgaccatcggttttacatcgtccgccccctttatcagcgtggtatcaaaaaatctgagaatatttaggcagttgcatccatgcgtgcatataaaaatgcaggaagtcaataccaaacagcagattgaaccgttgcttgatgggcgtctggatctgggcgtgatgcgcaatacgcgtttgcccgatgcgctgcagcatcgtttactgctacgggaacctttggtcgcggtagtccacgaggaacacccgttggccgcagtgccattgggaacgctgaaattccatatgctagcgcaggaacctttcgttttttttgctcgtgaggtaggaacggcgctatacgacgaaatcttgaatttgttggcgcgaagcggcatcacgccttacatcacgcaagaggtgggggaagccatgaccatcgttggcctggtgtcttccggcctgggagtttcgatcctgccagcctcctttacgcgggtgaaagtggacggagtgaaatacctgccgctggatgaacctgaggcaacaaccgaggtgtggttggtcaatcatcggcatcgtcccgttactgctcccgccgacgcgttgattcgtttaatgataccggaaacggtggcgcaatctgtttgaataaacgccttaaagggtgatatatactgggaatgtgtgcagtaaatcacataactaatcaaatagttgacgccttataccaaaagccccaacatagccgttaatatttatttagaagcgcgaaaatactcggtaagtggcaaagaaggagccggttttgtgattatggatggacagcctgggcatattgatcaaatcaagcagaccaatgccggggcggtatatcgcctgatcgaccattttggcccaatctcccgcatcgaactctcgaaacgcgcgcagctggcgcccgccagtattaccaaaattgtgcgggaactggttgaagctcacctggtaaaagaaaccgaatttcaggatgtcggcagccgtgggcgtccggctatcgggctagtgttggataccgaggcgtggcactatttgtctggccgcatcaaccacggcagcatcactcttgcgctgcgggatctcagcagtaaactggtggttgaggatttactcccactgccagattcccaccccgaacccttgctaaaccgcattcttaacgaagtagaccaattctttatccgccaccaggagaagctggaacgtctgaccgctatcgcgattaccatgcccggcatgatcgatgcacctgccggtatcgtgcataaaatgccgttttatgatgtggatgagatgcgcctcggccccgaactggaacaacgcaccggtctgccggtattccttcagcatgatatttgtgcctggactatggctgaagccttatacggtgccgccaagggcagccagaatgttattcaagtggtgattgaccataacgtcggcgcaggagtgatcaccggcggcagggtgctccacgctggtaatcgcagcgtagtcgaaatcggccatactcaggttgatccttatggtaagcgctgttattgcggtaatcatggttgtctggaaaccgttgccagcattgaaaatatgctggaaatcgcccaacagcggctcaatgtctctatgagttcgttgctacacagttctccacttacggtggaatcgctatgtcacgccgcaatggcaggcgatcagttagccaaagatattattctgggcgtgggtcatagcgtgggtcggattctggccattatggtcaatttatttaatccggagaaaatattagtcggctcgccgcttaatctggcgtcttctattttacatccagcaattgaatcctgtattcgccagcaggcattgccggcttacagcgaaaatattcaggtagagtccacccgattttataatcggggaacgatgcccggagcagcattggttaaagaggcgttatataacggctcattattagtgaaattgctacagggttaatccactgctgctaataacttagagttaattattaataggtattaaatactcttttctccgctaatgactctcgcgccatccgctcgttagctaaaaaaacattccagtccggcaaaacattgcgctaacgcaagctgtttatcttcatcatcgcctagacttttcagctcatcgacaatttcgccaaggttcggcgggactattttgagttaaaacggcaaaattgcggagtaattcctttatgttaacgcgcgtatttgttactggaacggataccgccgtgggtaagacggtggtgtctcgggctttactgcaaactttcagtcagcacggtaaaaatgctgcgggatataagccggttgccaccgaaagcaaagaaacaccggacgggctgcgtaacgcagatgccttggtgttgcaggcttcatcatccattgcgctagattattcggctgtgaatcctttcccgctacatgaggaagtgatccatgccagcactgacaccctgatcgactatgatcggatgagcgccgggttagccgcgttagagcaacaggctgatagcgtagttgtggaaggctgtggcggctggagcgtgttgatgaacgatcaacgcttttattccgaatgggtggttaaagaaaaattaccggttattttggtggtaggaattaaattaggctgtatcaatcatgccatattaactgctcaggcaataatcaacgatgggttacctttattaggctgggtcgctaataggattaacccgggtttagcgcactatgcagaaactattgatgtattacgccaccagatacctgcgccacaattaggtgaattgccttatttacctcggccggaacagcgcgatctggttaaatatctggatttatctccgctgattaaagagtgaataagttataatttttgcctcatatctcttttattttatatccgattttggcggttatatttcccgctaaatcggcggcttatcccgaatggtaaaccgataatggtcttatccaacgggcaattgccgttgcgatcacgcaagataataataagcccggcaagagcgtgtattcgcccgtcatttcacacaccatcagagccgccataatcggcgcatgagtggtggctgccagcagtgtggccatgccggtcagcgccataagcagggcgacatgttcacctaaagatggccataaggcgaaaatctgcccgatcaacatccccaaggctgccccgacaaataacgtcggggtaaacacccctccaggcgcaccagaaccgctactggctaataccgcaattaatttacagatcagaactccgccaatcagcaatattcccggtggtacggccagcatcgattgcaccacgctataaccatttccccatacttcagggaatattagcgacagcaaaccaacgataattcctcccagccccaactgaagcggaagggataaattcagggaacgaaaaacatgaccgctggcggtcatggctttcaaaaatagtggcccgctaaatccagcaatcacacccaatgtggccatcagcagatattgcatcggtaacggagaaggaagcgcctgcacctgatataacggtgcctgttcgcctaagagtatattagttgttaacagcgccgtcactgcggcaataatcacggggcctagcgaagccagcattaaagtgccaaacagaatttcggcaataaacaggctacccgctagcggagcgtgataagcactggccataccggcggccgcgccgcaggcgacccaaagcttccactcgttagctttggcatagcgttgggcaaaaaccgatgcaaacagcgccgccagcagcaccatggcaccttcgcgaccgatggcgctaccgctggataccaccaagagagaagcgaaagacttaaccaaactggcagagatatcgagccgaccatcgccaatctcgatcgcctccatataatcggtaggggctgtgggccgttgatggcgatagcgctggaataaccacaacacaccacctgccgccactccacccagcgccggtgttaacgcccgccgccagccagaaatcgaggaggcagcggccaccaaactgccatcggtacgggcaaatagcagccactctaaccccaacatgccgcggtggaacagccagacaatcaccgccgaagtcatccccagcatgattgcaatcagcaaccgccgtaacatggcgcgataaaaatgatgatggagtggctttttcatgcgtcgcgagttaactgattgaattcagaccaccattgttacttggccggatgtgaatggctagtgaatatttagcttggatcaaaacggagaaaaatgcaggcagttttcgttaaagaagaacaatggaagtaaaaaggaaagatttaacaagctagaagctcccgccagaggctggccgcaaggcgggagcaaaggcgattaagcgttatttttcagatgtcagcgtgaaatagctagtcatcaaattacgataatcaggaatgtggttggagaacagcgcgcccagaccttctacgtcattgcgccagtcgcggtgcaattcgcaggctgcgccaaaccatgtcatcagctgagcaccggcggcagacatacgatcccatgcggcatcgcgagttaacggattgaaggtgccggaagcatcggtaatcacgaacacatcaaagccttcttctaacgcggacagcgctgggaaagccacgcaaacctcggttaccacaccggcgataatcagctgttttttaccggtggctttaatcgctttaacgaaatcttcgttgtcccaggcgttaatttgtcctgggcgagcaatataaggcgcgtccgggaacagggcttttagctcaggaaccagcgggccattaggaccggtttcaaaactggtcgtcagaatggtcggtaagttaaaatacttagccatatcggccaatgccaacacgttatttttaaacttatccggatcgatgtcccgcaccagagacaacaaacccgcctgatgatctaccagcagcacggctgcattgtctttatcgagacgtacatatggtttgttcatttctcactccattgtttactacctgaatggccgttggttgatataaaccaacccaacagcgtgtaatcagcggctaattccgctgagcaactgtgtaataaagtatagataaagttccaataagtgataagtagctcaaattaagccacagtgttccataaacggaacaatgagcttagcgcgaaggaagagggaaccttattggcgaacggaggaatagtgcgcttcagaccggatcacaacgaggaattttggaatggagaaaacgtaaattgagaaaccgtaaaaatagaaaagggcgcaacccgtgcgccctgatgaatatagcttaacgaaactattcgccgctggtaatccgggtataaacaatcttttgcgtatcgttttcgcagtgcccaacaacttggccgccggctttttcaacctgatcgttaggtacgatttccagcgtaaaacccgactccggtacaccgttattgataatcttttgcgcaatatccgctttcacgctttcgcaagatgcctgtgcggccaaaggcgcaaccgccagtaacaatgtgccgataataagcgtttttttcatcagtaaatccttatttgggatgaattgctagtgtcgctaatagtagttcagacagcctgaacttcaagtaaaaagcaccgttcttagctattaaggattaatcttatggccgctttgacgatctaaacaacgctgggtattcggttcccaataggcattgaaattagagctgctcaagcatttatctttagcatcttcagcaacgtcgtatttgtcgaaatctttctctttacgcgtattaaccttattacgtaggcggcgggtttcatcccactgttctttgctttgacgggcggcttctttcgccaaagggtcattggcattattgccgccaacggtaacgcaggtgcttccttgcgaacaatgacttaattgcgcctgcgccatagaggaccaggataaaggcagcatcaataccgcagcaggcaacagaacgcgcaatgcgatacgcaggcgattgtttttcatcattaaatccttctttatcgatgagttaagcgactcattttgtttaagcatacaaacctatagataaactatatcattgctctgtgacgatgtacccactaccgcaaactcatttaacctttagagagaaaactcgtcgttatgttgaagacttcattacttttttttgccaccgcactcgcggagattataggctgtttcctgccttacctctggttgaggaaaggggcaccggcctggctgctattaccggctgcggcgagtttaggcctgttcgtctggttattaacgctacatccggcagcaagtgggcgagtgtatgccgcctacggcggggtttacgtggctacagccttaatctggctgcgagtggtggagggtataaagctatcaatgtttgactggttaggtgcaggtattgcgttgattggtatgctgattatcgtggctggttggcgggtcaattagcggaaatcagtgaaagtaatgagtaaaaatagagcacagtgacttcactgcgctcgatctgacaccgcgtattatgattctcgatgaatgttcaacccagcgaatgattggctaaccggcatcatttctaacgtattaatattgacgtgagcgggcagagtcgctacccaatagaccgcttcggcaatatcacctggcatcaatgggttagctccatcataggttttattcaccttttcatcatcccctttgaagcgaacggaggaaaactcggttcctccgaccaatccgggttcaatatcggtcacgcgaatacgcgttccgtgtaaatccgcacgcagccctaggctgaattgcttcacaaaggctttagtagcgccatatacgttgccaccggcatatggccagtttgccgcggtcgagccaatattaatcacgtggccaatattacggctgaccatttctggtagcaacgcgcgagtcatattcaccaaacccttggtattggtatcgatcatggtttcccaatcatcggcattggctttgtgcgcgggctccaaacctaatgccaaaccggcgttattcaccagcacatcgatatttcgcagtgatgcaggtaattcgtcaatagcctgttgaatggcggcgcgattgcgtacgtccaaccgcaaaatatgcagggcctcacctaattcgttcttcagttgctccagtttttctaaacgtcgcccgctggcaataacctgatggccgtggctaacaaatttacgggcaatggcttcgccaaaaccggaggttgcacctgtgacaaaaacgatcatattccgttccttaccaataaagtggggcgataactgattttatatcattagcatactcggataatttttatcacgatataattaccattacttggaaagaatccgaactgaatagggtggtcatggttaaatcgtgaccgaatacaccgatgtgcgtcattttcttcggttactttaccggaggcaacttcatcacggtgaagcaaaaaggaaactaacagacagggagagaaaataccggggagctatattcctctttgattcgctacagcctctatcccgagcagattaagacattatagcgttacaagagagtctcactaaaaattaccgattgtgcttatctcaggtaaacattaatcgtgacgcattcatatggtcactgataatggaacgataaaattctggtgccaatatgaatggcaccagaaaagttcgagcataagctattatttaaagttatggttaatttaactttataattctgagtttcgctttgtagtgctgtgagtaataaatttatatagggatattattttttttggttgttatcgcagcttgtgtaaaaatgaaacacctcacattataattcagatgggaaatactttttaactaaggcggaaaggactgcgagcgtttcttcatccattttaccgtcatagcactctgggcgaaaatgtagttggaaagctcgaattaaaatctcataacctatgttagtatcagcactactggtatcataaccataaatattaaataattttagaatttcatctttatccggcatggagtgattatactggcataaatattcattttttgtttcatcatcataccaggctccgacgccacacatatacagttcaaaccacgggaaggcagccccgggatcacttttacgccccaaggaaatatctgaatgagccaatacatgggtgggggatatatccggataacgttgtaagatgttaagcgctaaatcttttacggcttcaatttgctcatcattatagggtgggaaagtaaaattaccattattatcagatgcctggttaacaatctcaatgccaatcgaactgtcattcagattggttcgctggtgccagcgactttcccctgcatgccaggcccgatcattttcatctaccaaattaaatatacgcagctcgtcaaatccggcggctatatagctcggatccataggatctggaattaaataatgcgaactgactaacgggccagttaatgcggtgatcgaaccggtgaaatcaacgacggtatagtggagaatcaaatatctaacgcgtttatcgaatcctttcacagcacggaatgaattataatctatatttattaattgagtgttttccatttaagtactccttgttatttgtgaatgattaaaattattttattcatcttgccgtccattaacaccgattgagatttacattaatttaatttaatcgaacgggcaagtttgattttaaattatggtgcgaacaacgaccgttttatatcactaagtcaatgtcgtattgaatagaatcaatagcatatagagatgacaaaaagtcattcagctcatctgattggtgtgaaacttaaaaatcattaaacatgacatctgaaagttgtgtgttacttatttaatagatttatgaatgggccggggaaactaaaaaaatactggcgcagcatttatcagatacaggatggttcaggattttatttctactaaattgatatcttcgcatcttaaactcgctaaaatgacagagactcatattaatgacattatggatgggatgcttagttataatattcaagtaagaaattattattttaaccgcctgttgaagaaccaataaagagccaatgtagccgctacgacctggaaaaagttatgctggtaaatatgtctgtggccatgctgacgaccttaggttaccccggcgctaattggctggataacgtatctctctgatctgtatgtggcattttttgtggttgtggccgtattcctgattattactttaggtgcctatacattacagtattagattttaactgagtggcaattgtgccttttatcctgattatcttataccgcaaggagtttcaatgagcgtcaaacttatcgcagttgatatggatggcacctttctaaacagcaaaggtcagtataataaatctcgtttcagaaaactgtatcaacagttattgcagcgcggtattaaatttgttgtagccagtggcaaccaatactatcagttgaaaagttttttcgatgatattgacgaccaaatagcttatgtggctgagaatggcggatatatcgttgataaaaaacaggaagtttactgtggaaagctaccttctgcgcaggtggctcaagtgctggaatgcatcagtaccttatcgggaatcaattttctggtatgcggtaaaaagagcgcttatatgctggagactggcgctcccgatttctttaatggaatgcgtacctattatcaccatctcaacacagtctctgattatgcgcagatcgatgacgttatctttaagtttgcccttagttatgaacaagatgacgtaagcgggctgatggatgaaataacacaaaaaataggtgacattgtcacaactgtttctagcggacatggttctgtagacctgataattcccgggaatcataaggctaatggtatcaagcgaatccaaggcatctacggtattgcagataatgaagtcatggcattgggtgatggcggtaacgatctggagatgttaagacacgcaggttacagtttcgctatggaaaacggctcgctggcggcaaaacaagcggcgaaataccgtgctccggcaaataatgaggacggtgtattaaaagtgatcgatgattgcttgaataatcgaccaccatttgatttataccacaaataaatgatgcaactacgtgaaatcagcagggtcatagccgatgatttttctcagatttcacgtagcgcgatcggaaataggcagtggtttgctgctatagccaacaattaatcgatgaacatcccgtgagcatctcgattaaaattaatcttaacgcagtgtcattggtcaatgggtagtcaggtcgttcacattaaaattggttcagaagaactggagtactcgaaggagcaagttgagtgagcgaagcattcaatgagttatcggttagcgggaatacatgtcggtcagtaaaagatataggtaacaaaagaatgaagctgtgaatgaggaatgtttgcgagcttgactaaggatgagtgcattattcagaatcaggttttagttgggataaataaaacccaaaatgagcctggaatgaagagcaacaggaataaacagccaatggataaggattaaggccaaaatcgggaaactcacacacctttacctcggttcgcataatgtatattatgttaaatagaatatgatggttgttaatgagttcatgcaccatatctcggtgtgtttattaagcccttccctttaacagagatgcctcgctaactttgccataacagcgcttgacctccgtccttccgccttattgattaaatacccgccacggataatactgctaaagtaagattctaaaatctcgtggaactggacatgaaaattattatcatagtgcttgtgttgtgtatgagcgcctgtacatcttctaagcatataggtattagcggcggttcgggtgggatttcgggcgttagcatgggcactgttattcggtaatttaccgcgtatgtggttgattatagtgatgacgaataccgcctttcgcggcatgaacggttgtttccctcgtaatatcctcgatgcaatctatggtatagagaataaatgtgaatacagtcaggaaatgtgggacggttatcaatagataccttttttgttaattttattacccgctatgacttaaaaactctcggtttgcagtaccaatcctaacgcagaatatacaggccgttgcagactgacatgatgatcagtctgcatacagctgagcgaagcaaaaccgagagtgaaaatcaaacccgcgcttggttaattaaccacgtaataagataaagtggctttatcgaggtgaatatcacatcgattcttatcctcatgaggcgtttccgctacggtagaaaccagccattgccctttcgccgtaataggtagcgttaatttcccattgctgtccgtctggccttttaaatccacatcttcaaaggcgtaagtgtgcgccaaggcgggatgagacaatgtattatttttttcatgggcgtgatcgtgatgatggtgttcatgaccctgtccctcggcgtcgctgcgttcctccccatcattaaaaataacgccaaaggtgtgattcgccaaaggtttaccgttatacagcagttgtaattccaaatcgtcgccaatcgacagttcattcggattctgtaatgggacaaactctaatcttaatcccatcggttgggtaataaacggattggcatcgggatttttcacaaagctgatggttttaccggacatagtgttatcggtgcaaaaactacctggccattgggttttatcttcttcctgacgccattcgtctttctcccctacgcgcttcactgaccaaatagttggcttataggtagacagagcgatataagagccaggcttcaagttctcctgctggaatttgacgtttttaccgtcgatgttaaaactgtattccttactgccgttggtcaattttagcggggcaaagaaatgcagtctttgagccggaatcgcttccccatgtggaaatccgtgaccataggccatttctaccgttgccgtagtggtgttcgccggaggcatattggtccataaatcatgggcgctgaccgttgaatgtaacaacgaagcgcacaggccaagagaaaaacacagggtatgagttcgattcatttaactactccatatttaatatccaacaatatctggacgttaaggtcagctatcccttcccggccacagaatttgagtgtgataatgtaacaaacttcatttcctacggcgaatgttttgttatgttataacataattatcatcgcggtaattaacgatatctcacaaagtagcgatagtgaacatggccgcataaatgctctgtaatgttctgcatgaagccataacccccctttcccgttgaagaatgatgaattagtgctttcatcaccttttctatcgtatgattgaaatcatatgcatttctaacaacttgattcccccaaatacgacagccgtcgctcacgagctcatttccgcttttcagccacgagctatagataaaatccggtttatagctatttttttataactgttttttataactattttgtttatcacccctaggcttgcaatgactaggtttatagacatgaggcgggaataattaagcctcctgaaaactgccggagagaatcattcagtgagaaattacgatgaaaaaaagtaagacgctgttctggcggcacgctagcgccctgtttggttgggcgttaatctattatgttgcgggtgtggtttcgcaacagtttgattccccggcgtttcaaatatctctggtgtggtttccctccggggtggctgtcgctgcctttttggcggtccgctggggctcgtggccgctgctgttctttattttttcgatggtgagcgttctacttgaacaacactggcgcgaagatgtgctcagtgcgttgttctattccgtcctgtcgttacctgccagcgtggttattgcctggatagtgcggcgttttgctcgccccaatgacgatttgcacgctattttactgtggataagcgcgactcttattatcagcgcgctggatgcattgataaccggtggcggaattgcgttggcggcaggtttaccgctattcagcctgttctgggtcagcctgattgccgacgtgaccggcattctgtttgtgaccatcattattatgggtttcctgaatatcagagtgcgttccgctcgactcacgctaagggcaaagctggcgggagccgttgtttggttactcctttgtgctagcacctggctaatcttttccggaaaactacaggatttcgcggccagcggcgccgcgctgtattttgcgctgtcctgcattcctatcgctatcgctatcgtgctatcgattatagccggtaatcggggcggttcgctggcattgctgacattgggtgccattgtgattttttatacctatcaacaccaaggtccattcttcttacaagggcttcatagcggcgaacccttgctgctcactcagtgttatctgaccgccacggctttattgatggtattcctgcgtggattatctcactcaatacacagtttcaacccagaaaccggtcgtattgaaggagacggggtgatgtaccagctaaacctggaatcgggcgaaatcctgtgggatagcgacattggtgccctattcggtgagcgaggatcgaccgctttcctgcatattgatgctgtattgccgcgcatccatccgcaggacagagaaaaactgaaacaacattggcgggcggcagaaggtcgggagccgcaaggtgctttggcgttgcgcatccggacagccaacggagaatggctttctatcgtggatggcggctgtgtgctgctgaccggtactgaaggtaatcgtgtgatgggtaactggcaaattagccagtacaactagattagcccgtacaaacaagggaaatagaggtatgaaccgttatttaccgcagagatgcctactatgattcaaatcgccctgctgttatttggcgttgattttgtccgctccaaagcccgatttcttggttttcttggcgcagtctggggattaattggcatcgggatttttatcgatggtatcgatggtacgctgtattttcccataaagacctttggcgtgctgctattactggaaagtctggtgacgctcagcgtggccgccagcggcgtaggcgcacaaaaagcagtgctgtattttaaaggcgggttgttttgtttcgtggcgctgctgatcctgtcgaataaaacctacagtaatctgctgctggcgattatcttcggctttgcctatttcattattggtgcgttagtgattgcttccgcctgggtggttcgttatccccgctggaaacaggcaatggccggcggaggctgtcagattctattcgccatgtttatgtttagcccttatcccacgcactatcaggctactgtgtcattctttctgggtgtcctaatgtttatcagcggggtgaataccctactgctggcaaggcgcgccaaccagttgagtgaaggcacttcggtattcgcgctgttggctccttcggatattctgtccggattgaccaaaaagtctgcggcaaaaccgagggcacttccacctgagcatgtggatttcactggaccactgaccgtgcatatctggacgccagaaggtgccgcgagtgccagaaccattccgcgcccagtgatcaatcgctatattgcggcggtggatacacaaggggtgatttccaccggccatgcggcgctggaattatcgccgaaagtgtacatcagtctgtatcccgcagcggatatcgatcgttctccatccgagttcttgcggttgcttaaggctacgcgcgataacgacgttgacgggagttttcagccggattacgccaccgaagcggccaattggtgtgaatcagacagaaaaatattattccatgaatacaacggtccggcgcttttgcgctattgggacgtttatcagcgccagaaaacctataacctgacatcacgtaattgctccagcagcgtagcatacgcgttagaagcgtcattagatggcgtactggccgaacaggggaaacactggcggccagcgttacgaaccttgtttatgcctgaactgtggatcgcagctcaggttcgacgacgagcaataaccatggcctggacgccgggtttagtgatggattatgcccgtgcgctgcgagcgattgtgcatccggtgccacaatcctggtatcagcgaatgccgtggaaatggcgcgtaagcgatgataataaggcgggaacagaaactgataagattttttagacccaatcttgttgattaaaagtgacggcgtcactcattcggtgacgctgtcgtcgcattctgaaagcgtaggtagcgaaagtttaacggaacggaggctcgttaaaggtgcgcaatttacgcgagtgtaattggtcgccctcttcgcgtaacaaatcaatggcgcgaatacctatctgcaagtgttcggaaatcgccccctcataaaaatggttcgcctgaccgggcaatttgatttctccatgcaaaggtttatccgaaacgcacagcaaagtaccgtaaggaacgcggaaacgataaccctgagcggcaatggtcgcactttccatatccacggcgacggcgcggctcaggctaaacctcagcgctgaagcagagaatctcagctcccagttacgatcgtccgaagtgaccaccgtaccggtacgcaaccgctgtttaacctctttccccggcattccgctaaccgctttggtcgcgtcatacagcgcccgctgcacttcggcaatgctgggaatgggaatatccggcggtaatacggcgtccagaacgtggtcatcccgcaaataagcgtgtgccagcacgtaatccccaatcgcctgactttcccgcagtccgccgcagtgtccaatcatcagccaggcatgaggccgcataaccgccaaatggtcacagatcgttttggcattggatggaccgacgccaatattcaccagcgtgattccctgcccgtttttagcgatcaaatggtaggccggcatttgatgttttttccacgccaaatccgaagtggttttttgcggatcggcgttttccgccgtgataaaagtgcctccggcgcaggataatgcctcataagggctactcggatcgagaatctgttcgcaggcccaactgacaaactcatccacgtagcgactgtaattggtaaatagaatataaggctgaatatgttcggctggcgtaccggtgtagtgtttcaaacgcgccagtgaaaaatcggtgcgcagcgcgtcaaagtgagacagcgggaagttctccgtcgcggtatccaatccatcggtaataccgtcgccaatcttggctagatcggtggtgggaaagtgctgcgccaatccggcggtcatggtgcggtctaataccagatctgaaccgtcgatcacaaagggatagggcatatctatttgtgacggcgtcacttcaaaacgtgcgccgtactcaccttccaacagagtcaactgttcggtgagatagcgacggaacaacgctgggcgcgtcaccgtggtgctgtagcagccggttcgggaaaaacgtccataagcgcgggtacgaatattgtcgcggaactggccttcccaactgacgcttagctgaggataggcaaataaacctttggcacgttctgccgcatcgggcagttttccttcgtgcacaaagtcgctgatagcttctcgcaacgcaactaatgccgcactgtacagcgcctcgagtttatccaacgcctccgatgcagtgagatgaacactatcttgcgtttttttcaaaatatctccttaaagcaaagggtaaggcgtttgatttagcttactaatatagtcgtctttaggaaatgattgatatagtgatttagttttatcagaagaacaaacagagccaccttcctgaatcctttcttgtgaaataaacagtatggctctctgcacaaaatggagcattccaagctgactactgccgaaatcatctatagtgttctgtctgctatatggatgacagattttctgaaaatggcctcagtgctgaaggaaccatggtaaataatataaacggccccgatcatactaacaaacaccctatggcgggttttccgcaagtttgttacatcaaaaatacggtaactaatcccaatattattatcggagattatacctattacgatgatcctgataattccgaggattttgagcgcaatgttctgtaccacttcccatttattggagataaattgattattgggaaattttgcgccattgccagaggtgttaagttcattatgaatggtgcaaatcacaagatatcaggcgtctcgacttatcctttccaaatatttggaaacggctgggaaaaagtagccccttctcctgaagatctcccgtttaaaggcaatactgtggtgggcaatgatgtgtggataggatttgaagcgctaattatgccgggagtgaatatcggtaatggcgcgataatcgcgtcccgttctgtcgtaacctcagacgtaccggcctattcgatcgttggcggtaatccagcaaaagtcattcaatatcgttttgctccagacctgattgttaaacttgagcaactagcatggtgggactggccagtagaaaaaatcactcagaatttatcgttaatagtgtcggatgacgtgaatgcgttggtttcaatcatggatatctagctaatgttggcagagctgacctgcggcggtttccccgtggtcagcgagtaagccatatgaaatagctataacggagactatctgcgccaaacggtaattccgactttccgactttatctccctccctccttttattcatgccgaattaatcagcgtcgaacagtttatttattttctctcgattcttaccttatttgtaagaaatcagatagtgccaatcactgccatttgaataataagttcacgcccatatctgatattcaataccattatttattaagtagttacctgtgttatgtcatttgatttggccagtaaagatgtggaatctaggacttcccacaagggagaaaaaaggtagcgccaaatggcttcaaggttataggcgctataaataacaacattacaccctttaaattaagagagaaatatatgacgactaacaattcacaactgagacatggccgaattactactcctaaaactcgcggattagtggcaaccgatttaggattaatcggcgaatgggaaaataatgaaatggaaggcgggaaaaatttccctgacttaaacgcgggtccggttcctgcgccgttccaggcggataatccaagtaatattcctcctaaggatgggttgattctcagcggcggccacgcaggcaaccgtgaatcggtcaactttaccgatcaggaaatgcagcaaaagctgcgagcgctgggcaaagccgatgacagtttcagttggcctaaaattgcggtaaaacctggcgagctgtttgacgtcaaatgggcctacaccgcccctcacaccactcgcggttatcgctggtttattactaaggacggttggaatccgcaggcgcgcatcactcgcgatcagctggaagtggctccgttcagcgaagatttctacccgttcgtgccttattactcacatcaggctaaattggtagcaaaaaccaaccatcaggttcttttacctacaggtaaaaaaggccatcacgttattgtactgctttggatcgtggcgaactctggtaatgctttctatcaggcatttgacgttgatttcggtgcataaaccccatgggtgatgcttgactataattgttatcgcgacgccggtctgcttaggagtaccggcgtttttgccttgtttcccgcttttcttctttaatgtccctcttttgtacactatccctggttcgcccctatcttttcgcgtcaatttattccgtatagcgattgtttttgataaacaaggggtggttttgccacctattcaagcgtttgattggtgttaatgagaattaaagtatccgctgttgcagataacacattattttctgcgttagacatctctcataaagggtcccttttgcgtggcaaaatcatttttacgcagtggaaatttagatgacatgcttgccttgggcgaaaatgggcaaccggtttatgcttcggcactccagcttcgggaagcgttacgcttaagaaaacagcaacatattgctgactgtctggcgattcctcagccaaatgaagacggcgaccgcatggattggtattcccctatatcaggcaaggttacctcctggattgcggccagccatagccagcgcacttcggccataaagcaactggaaatgtgccaggccacggtggcggcgattagccaacgcgctcagcaggcggaaaaaaccggtcataagctattcggcgcgctgttggcaaaagccttccaatttcccgatcagaatcacgtttatttggtagatgacaaaccagtcattaccttctggggtttcgtcaatctggataaaaaatcccgatccgacgctctggattgcctgcgtgccacggtgcatgagccagccgttgagatgatgccagcggctgcgccggttagcccgaaaacagcgtctgccgcgaccataccgccgacgatccccgagccggtgattgccccgccgccaccgccagtagcagaaaaccagccggtgccgccaaaccgctggcgtcgcctgcgtttatggctattgttaccggccgccgccgtgattgcggttttagcgctgcaactgtcagcgaccaagcctgcccccgtagctaagcctgcagtcagcccaaccgtgaccaaaccggccactaaaccggtagaacatcctgcttcaaaacatccagcttcggcagctaaacccgcgcctatcgtggccgccgcccaaccagcggcagacaaacctgcggcagaagtcgaaaaacccgcgccgacaaagacctcagaagcgcggctgccaaacccattgccggtgactcatgcgacagtgatcgctccagtcgtacctgagccacctgtggctgccgcagtagaaaccgttgccgtgccgattccgaaagatgcgttggtattgccagcggacgcggtaaaaatcggctccaccaagtttctgaatggccgctggcgtgtatttgtggatatcaaagatccactgacgggcaaaccaccggtactgaaataccagataaatgatggcaaaggcaccgcccgcatcacctatggtgacaacatcagttgccgggtcaatgttaatgccggtctgatgcaatctggcaatctggtgatcaatagtcgtaccaaggcccgctgtagcgatggttcccgttaccaggttcccgaactggtgtgcaaacaaggcctgaccggccccgctgaatgtaccggccgctatgacgctgaaacccttcttccaatgacgatgaaacgtgagagtaaataaacactatgctggcaacgatcacggattataaacaacgaattacgctgattcagaacagcgggattcaatttttggactttgccttaacgcccgtcgtggatgccgatttgccccatgcctttgtgcgtaaaagcgccaatggcccattattgcgtttgatgtttaatcaagaacgtggcaaatacctgttaccggtggcgggttcagcgcctgaagtggtgaaacctgaattcagtttcccgctggatcagtcacttaagttgctggagaacatctggctgcctttacctttcttacgctttaatccgccgcgtaactttatcggtggcccggataactgggcgcggatgcagattttagcgttggaaaccccggatcaggacggcaatactcaccgtgtctgtttggcgtttgataccaaggtttatcctgaaggtcacgataacgaattcctggcgcccaccgagcatgatattgataccggcacgcattttgcgctggcatatcaaaatgatgaattaggtgaatttctcgatctgacctgggtagacggctggctgcgggaaacttttattcaacaggttagccagcaggaacaacgtaccgagcgcgaaattaaggcctcgctgcgggaatttgaatatcaggcgcactatctcaacctgctggatatgttaggtaagcaattaggcataccggacatcaaaatgaccaccgccacgctgcaagagcccgcggtgaacgtggatctgattctggacgtagggaattcccacacgtgcggcgttctggtggaagatcacggcgacggaatcaacgggttgcagcagtcttacgagctacaactgcgggatctcggccagccacattttttgtataatgaactgtttgaaagccgcgtcgaattttctcaagcggccttcggcaagcagaatttctcggtggaaagtggccgggacgacgcctttgtctggccgtcgatcgcgcgcgtaggccgcgaagccagccgaatggcgctgctgcgtcagggtaccgaaggtgcaaccggtatttccagcccgcgccgctacttatgggatgaagagagtttcactcctggctggcgttttagccgtaccgccaccaaatctcacggagaagcgccggcgatcgccctaccgttgaccaatctgatcaatgacgaaggccagccactctacgctttgccgttggaagaacgtctaccggtattttcccctcattacagtcgcagcgccttgatgactttcatgttgtcggaactgttggcgcaagcgttaatgcaaattaacagcccagcgcagcggcagaaaatgaaccatgccaccgcaccgcgccaattgcgtaatattattctgacgctgccgtcggccatgccgaaaccggagcgcgaaatattccgtcgccggatgcatgaagccattgggctcatctggaaagcgctgggctggcatccgatggacgatgatttcacccgcgctgaagataaagccaaaagccgcgtacctgtgccagacgttcacatggaatgggatgaagccacctgcggacagatggtttatctgtataacgaaactcaggtgaatttcggtggccgcaccgaagccttcttcgccagtatggcgcgtccggataaacagctcgccgcagatgaaacagcagggaaaagtctgcgtattgcgtcgatcgatatcggcggcggcaccaccgatctggcgattactcaatacgttttagatgatggcgttggcagcaacgtaaaaatcaccccgcgcctgctgttccgagaaggatttaaagtcgccggcgacgatattttgctggatgtgattcagctttatgtcttgccagcggtgcaggccgcgctgaaaaaatccggtgtgcctgctcctgacctgctgatgactaaattattcggcaatgatggccgcgccgatgggcaatcgacactgcgtcagcaagtgactttgcagctatttatgccgctggggcgcgccattttacaggcatatgaaggtttcgatccgttagacagcagcgccgagatcgacgctagctttagcgaattgctgattcaggctcccaccgcgcgcgtgctggactatctgaataccgaagtgcagcgtgagctgcgcgccgatgctgagccttttgatattcttcaggttgcgctgatcgttaaactcagcaaactgcacgccgagtttctttccaaccgaatgaacctgacccaaagcctgcgttcgctgtgtgaagtggtgtcgctatacgattgcgacgttttgctgctgaccggccgtccttcccgcttccccggtatcgccgcgctattccgccatttacagccgttgccaacgaaccggattttgtcgctggatggttatcacaccagtgaatggtatccgtttaacaaactgggtcgcattgataatccgaaatccactgccgccgtcggtgccatgctgtgcctattggcgctggatctgcgtctgccgggcttctattttaaagccggtgattttcagccttattccaccgtgcgttatcttggtatgttggacagcaataacaccctaagtacggataatctgtattacagcgatatcgatttggattcaccgtcctaccagttaccggcgaaaggcagtttccccgtgcgcggcgcgctgtgtctggggttccgtcagttggataacgaacgctggcccgcttcgccactctatactctgtcgattactgatacagaattagcgcgaaaagtggctggcgacggagatctgcgggtaagactcgcgctggtgaaaggtgtgcaggataacagtccggaacgattcgaaattgccgaagcgttactcggagacggcagccgcgtgccgctgcaacatttacgactgaaattgaatactctggccggtaatggcaccggcgagacgcattactggatcgacagtgggagcgtatttaaaaaatgaaatctttaacacccgaacagctgtcggccacgctcacccatcagttacaggcggttgtgcaaggcattgatcacagttttggctggattgaaagctgtcgccagcaggctccacgtctggataccgaagctgagcggctaaaaatcaaactgcgccgccataggagtgaggctcagcgtttgtcagttatttcttctgaagcaatgaccatcgggttttttggtcagtctcagcaggggaaatccgcgttgattaccgcgctgaccactaacggcgacaataagctggaaacccgcttaggggataaaacctatgattatctgatgcatatcaatccggataatcaggctaccgcattggcaacccgtttcacccgccagaatgtgccagaagatcgcgcttatccggtacggctctctttgctcaatgaaaccgatttagccaagatgacggccaacatcttcctgcatgattttttacaggaaaaggcactttaccagcctgatgcccactctatcaccgaacatctcaacttattggcgatgcatcgccaaagtcaggccgtgagcggtatcacggaagatgatgtggtgacgctgtgggattatttgctgcgtcaggataaaaacagccagtccctactgaatacgcatttctggcccacggctatcgaactggcgccctgcctgagcgtagacgatcgcgcgcgtttgttctcgctgttatggggcgaaatcccagcgttaacggcagcttatcgtcactttgcgcatactttacagcatcttaacggcgccactgtggtattggcacctttgagcgtattagttgatgacctacagttaccggcgaacggcctgatgaatatgaccacgctggccaacctgaatgcgccgtcggatatttcggttcaggttaggccgctctgtcagggggaaaaacaacgggaagtgacattgtcactatctgagctcacgctactgagcgccgagctatgcatcccgctacactccgccccgcgcgatccggcttttgccaccgttgatatgctagatctgcccaactggggagcccagcttgatacgcctatgttaagcgaatccgaaaatttgccgcgttacccgttggcacagaattttttgcgcgccaaatgtgaatatttgctggatcgctataccgaccatcaggctattaacctgctgatgttatgcagtgccgcgggtcaacgttctgaggtgaaaaaagtcgccaaggcattggattactgggtaaaaaaaaactcagggagaaaatgcgcaggtgcgtgcacgtcgtcatccggggctaatttgggcgctcactcctttcgatcaacgcgtcactcatggccagcattatgacgaagcggtacagcgtcaggttggcaatcccggtgatagctggggctcggtgcaagcgctggatgaacgcggtaccgaacgaatggcgacctatttaatcggagaaatcgcccgaaatattaaaggcgagcgcctgacggagcaactgcatgaattgcaacgggagttgcaggataatctgctcggccactggtatcactccgaaggtgtcagcgatccgcagaaaagacagcgcattgccgaaactttgattaaaaccctgcaaactcgtaccggcgttcacggtgaactgctggagcgtttattacctgccagagaggaactgctgcggttattcctgcaacaatctcacagggttaccaaacaaccgcgagccgatcaaaagatagcccaaaccagtagcgaacccttcagtgtggggattgaaatcgatttatttagcgaattacaggaagatgtcgacacaaacctcgacgttaccccatcattcacgacaaataacgacttcagctatgccaaagaggtataccgctattggatcaaccatctgcgtagtttgccagaaaatggcccattagtggctctgctgggcgtgtcgaagccgacgattgaaatgctgatggaagaactgattaccgccagtattcgtctggatatggaaggtgccctacagcgcaaactggccgatcaggaactgccaggtacaccgcgggaacagttggcagatcaacaagtttcgcgtgcgttaaccgtgctgggtgattttgtcgcctggttgggattcctgcaaattgaaccggcgcagcgtccagacagccggattaatcgcgggcataagatttttgctcagccagaaaaaccggtagcaaactggggcacatcccaacgtttgactcgtttggctctaacgccaaccaataccaccgcgttttatatttatgactggctggttggcctcaatgaactgattatgcaaaacctcggttactcggccggaaaagaattgagcgtggcgcagcgcgatcggttgggtgcgatattgcagttgattaaacctatggcactgtagccagaaaaaggtgcctgcgggttattaaccgtccggttatttttgtctgcgctttcccccttccgcttgcggccttgaatatcagtggccgcaggcggaatatctgtcatcaaccgccaacggctacctttttttccccaggctttttatctcgctgaatgctgttttttaatcagcttaaagccagacaaactttccagcatattttcaatctccggccattccccgtagcccgccgccgtatgaaaatggccaccgcctgattttatcaccctctcactgccccactgactggcaaactgctgcgcgcgatccagcgagagatattcgtcattatcactgcaaatcagcgtgctggggaacggcaacggttttgacggaatggggcgctgcacctgaatagccgccggtgccgtaatggcatccacatcggccggagcgaccaataatgcgccaatcactttgccggaatggtaacgctctgcccactgagtcacggtaatggcaccgcaactgtggcctaccagaaaaatattaccgggaataccgtcgatagcgcgagccagcctctcccgccacgtgtcacgatccggattatcccactctttctgttcaactcgcactgcattgatatatttgcgttcgataaatgactgccagtgttcggggccggaattggtataaccgggaaccagcataaaggtacattgaatcatgggatatcctgcaatcagaaataaaacagatattgagtctcgattataatggaacagtttttagcaacggcgagttcagcatcgctaccggggaaattaccggtgcgtccagcggcacatttttgccgtagcgctctttgattttttgctgcacggccggtgcggtcagattaaactctctcaccttttgcaattgaccaatttctagcccggtggctcgttgatacattttccacaccagttcggaacaatacatccgttcattagaccaatcaaaagtcagatcgtaaggcttgttttggaaggcttttccttgctcatgcagctgcctgacctgcgctgcggtcaatggcgtctttaaccgtttcaccagatactgcccgcgggcaccgcgtttgatccagcgatccagcggtgtgtatcgcaccgtggcaaccgcttcataaacatagggttttccctgcttaaacaacactattcccatatggctatagcgggaaccggtagcaaactgaatggcctgactttgggatgaagtagacgaatggaagataatgtcgccttcctgcggctgataggcaaaagccagcgcgctgaaaaaacagcccaataggacaaacgccaactttatcatcgagatatatccctatcaatgtcgctattaatcacagctgacatcctaacatccttccgtggcagatatatccatgaatttttggtaataaaaagggaactgacgttatttacaacaggtcagttccctcacacagccatcatttatagactaggcagcgttaattatgccgccgccgctgcttcactcaccaactgctgtagctgcgaccataatgcttctacatggcggcgctcagtgcccaaagtgccaatggaaattctgaccatccaacgcccgcctaaagttgccgtagtcacataagcattgcccgactgattcaaggtttccgcccaagaacgggtgtaggcatccagcgcttctccttgtaaacccttcggttcatgccgcacgcacagcgtttgcaaattcagcggagccacaagcttccaatcctcatgttccgccatttgctctgctaaccagcgggcattatcgatatcgcgacgcaaccgcgcctgtagcccttcaacgccctgctcacggattaaaaaccacagtttgagcgcccggaaacggcgtcccagcggaatcccccagtcacgataattacgtacttgaccgtcagccgtcgactgtaagaagctcgggttggtgctcataatacgaatcaaatgctccgaatcacgtacacaataaaccgaacaatcaaaggcagctccgagccatttatgcggattcagcaccaccgaatcggctttttcgatcccaagccataagtgacggaattccggcaaaatcatcgcggaacccgccattgccgaatcgacatgcatccacagcccgtacttctggcttatatcaccgatagcatccagcggatccatcgccgtggccgccgtggttccggtggtagcaatcacgatacaaggacggtttccagcggccagatcctgctgtatcgctttatccagtgcgtggggagacagggcgttgtgctcatccgtggcgactaacctgatgttatttaagccaaatcccgccagcatcgccgctttgttcacgccgctatgggcttcctgcgaggtatacacaataagcggcgcggcgctattttgcatgccgtcctgcatcaatgcgtagtcggaagtccgttcccgtgcgctgattaatgccaccaatgtcgcagtcgatgcggaatcctgaatgacgccactccatgcatcactcagaccaatcatttttagcagccagttggtcgtgacttcctcaatttccgtcaatgccgggctggattgccaagataggccaattacgcctagcccggtactcaggcaatcacctaataccgatgacagctcaacgttggaggggaaataaccgaaaaagtgaggatgctgccaatgcaataaaccgggcatcactagcgattccacatccgccataatgtgttcaaaggattcgcctttctccggcgcggtcattggcagattggctttaatctcacccggcagcgtattcggatgcaccggccgctgctcaatattctggcgataatcagcaattaaatcgatcatggcgtgaccatgccgacgaaattcatcaggagtcataatttattatcctaaaaggaaaaagttaatgccgcttagcaccagaaatagaatggttcattggtgttatagccgataaatgactgcatgctgatgcgtttgcccgaatcaaacccgcaaattgcatgtggtcgacgcgtattaataatcaccagttcattcttttgcggctgaattcgcagcgggaattgcagacgttcctctggtaattgatcgccctcaaacagttcgacctcatcaaatgaaaacgcctccgtgtcccataccattaattctcccccggacggtggagtttcaatataaatattggcgctaaactgatgttctaattcggctatggagaatggtaggcaatccacgtggggaaccgtttcggatagatgagccgtctccgggaacatggcgcggataatcccggcaaacatcggttttccctcaaaagatgcggtaaccgctccgtctggccaatgttgttggaaatggtcaatcaatgcctgcaccggtggttttgctggcgcgcaaatattatcgatcagttcacgcatcttggctgcatcggcataatatttctctttggcaccgtcgccatcaggcttgccgtaggtcatattgaacggcgtcccccagcgatgcacgccgtagaaattctgcacaacctgaccatcttcataagtttcatgggtgtactggtgcagttttgccgttttatcgatgtaatcattcagcgatgaggcagtttcttccgtacagtagttagggattcttatggcaagaatttcgccactgattaacttttccagactgcgttggtcaagttgttctaaggtcacaattttggattggctagccgttgtggtctggttggtgatgtcttgtaggttagacatgatgatgatactactccgttagtttatattcactcatcaaaaccctttaaatacaaaggattacattatcatcactgcatttttgagaggatgcgccaacctgaggcaatggcttcattcagcgttccctcgctaataaccaaagatgataatagttatctttaccaataaataatcgcctgtatataacaaaattaatttattttatgaatattttgatttttttcgtataaagctatttgtctatagtcctgacctgataaaaaaccaacaaatactgattatttatccacctaaaggcccacttgagggaaaaatcggggagattgaaacagatgttgaatgaagtggttaaaaataaaatctattaatttcaatgataaatagattttttatatgcgtatagcccaatgatttgatgacgagatagagtgaaccttgccaaaattggcaacgctctaccctattgactctgcggttgtttacagattaaagactttaggcgaggagtaaatgctgcaactcagttaaagaactgacctgatagcgcggttgaattccttctggacgcgcatgcccctgagtatttaaccagcaagtatcaatacctgcgttaattccgccctgaatatctgaatgcggattatcgcctaccatcaagatttgctctttgggcggatttgccatcagattgaacgcatactcgaaaattcctacgtccggcttggctacccctacttcttcggaaataaccagcggcgagaacacgttcttcaaaccggtgcgttccaaacgaacattctgtaagtcagtaaagccgttggtaataatccccaattgagctttaccatgcagcgcattaattaattcctgcgcgccgggaagcagagcgcaaatatccgccatcgcgaccagaaactcactgtttagcgtatggggcgatacgcccaacctgttcgcccacatttcaaaacgagtgctttgcaactgtgcggcattaattttcccgttttgataatccacccacaatggctgattaaccaattgataatgctcataatcctgtagcgtaaattcagttttgaagcgggaaaacatcagttttaacccttggtaagcatcaaaatgaaatagcgtttcgtccgcatcaaaaagtatccacttgtacttcattctttctacgactcctgcggttaatacgccacttgggttcctgattttatcttagccggctattctccggtagtttgtctgtatgagcaaccttacaacgccatacatcgtgcaaaatatcagatcaataaaagcctgattcggctttctgaccggatatttactcggctacgccgctaaagagcgcagtatggtacggttgatttttactgggcgattgccttcggttaatggcaaattgaaaaccgagtgcgttttttcattcagcgtagacaaggcttcatccaatgggagtgccatatcttccgcaatatcgataagttcatctctggaccacagcagccgaccaattaataaacgtaatagcgccgaatgatcggcatctaatccaaaaatttccaccggttttacccaggtggccatgggctgaataggcttagatttttgttctacagtagcgggaaacatcgttgatagcactttatacagttcgcgactttcctgctgcaattgcgccactctggcattatcgttaatcattttagccgtggtctgagtcacgctaaccggcggtgattgatgcaggtcggtatagaccaatttactgtccagtgataaccgcacataaacccgctccagaaatttcacttcctgcggggtaactttgccatcggcctgaaccaggtgggccaaaaacgcggcaatagcccgtcgggttgtgacactgagcggctccatttttttacgtaacgcgcccaaggtgctggttttctttattcccggctgtaaatacgcttttaagcgcatacgttgaccggggctgatatgcccccaggcatcgacatgttggctgagcatcattaattctggctcagaaatcccgccgtctaccattaccgccgcgcaggccagatcgagcgttaccaccgttacccgataagccgggagcgtttctgattccgttgctagcaccgtgataggaaacagtgcaatcgtatcctgtgccgacggagtaatattatcggataaaatatcaggttcgaccccaagctgtattttctccatagctcggactaacgccatgactttattacgcgtcacctctccggggctatttaagcgggtaaatagttcgttgtaggtcatgagcagtaacccgtatcccacccgctctttgatattgtccaattcttgctttaacgcttctggccacagcgtcattggcagtagcaaaatagcttccagatcgttaattttatcgggattgagcgcaataaactggctgtaaccggctaactcggtgtaacaatcctccagaatcagccttagtttctctctgctatctttagccacgaccacatcaggcaaatcatgaatacgccgggtaaactgttgatccatcagccctgcggaagccgaacggtagcaaatctgtagtttggttttattcataggcagtatgaaaccttgcgggaaatactgtctatatcgctgttggaacagctgcgagaaaacgccaaaattgcgcgtagcggcaatattatgcggcaagttaggatcagataatgcccaggctacggcccaatccgccggtaatggatgctggtcaacggctaactgccctaaaccgattcgtaaacctaatggtaaatctgtcccgtagctgccaatcggcggcgaagaaagataagttttttccgtgggatcgagaggtgtgagataaaccaataagttacgtgcacaacgttcgaattcacgatgctcgccataaattccgagtaaacggataatttccgcttttaacgccggttgctcatttttggctgcaacgtctacgtttgcgtcaatcaataagcgatgttctaatccatagaagaacaggaaaacgtagccaatataagcttcaggagcctgacgcccttctgccagccattgcaaataagcgcggcgagcctctggcgatatcatggagtagttaggacgttcatcagtcagcggcaaagacatatcaacatgatcggcggccactttcagcgttgggttaataaacgcaggctctgcgccactgcgattacttttcaatttattcccgatgtagatcatgccatccggtaaattaattccggccaccacggccagttccccaggaggcagccaagaggctcgcgatagtgagccttgaggtagcactgaagcctgataattttgtttattcagctcatctgccagcctgaaaatataaaactcatcgtccgattgcagcgggagcgtcgccgagatgtccctctcgtcggaaggtatatcggaaagcaaaggcgaaggttcagttgccagttcgagcttcggcttagagacacgctttgcggctttcaaataatgccaaaagaagaaaatgcataatagtgcagcaccaacggctattgatgtttcttttggcagcagtgatagcaaagccaaaagaaacattaacagtatgacccagccagttgtggcagattttatcttagtcacgatggtttataagcccctatcttgaaataataatttttatgctgcccttaagggcaatttcttaataataattctatttttataaagtacgcattgcagatagccgaaatctccccgagttaatacaggtgaaatcaactcagcagattatcaatataagtaatttataataaagcctcccgatagcgggaaaaacaattatgccagcagacgctagtttgagcacgctgtttgtaaggaataatgccagggcgctaacaatataagtggctaaaaagtaggtagcagttgccagaacagcctgagtgtatccctatcacacataaaatgctgaatgattgctattttcaaacagaagaatctcggttaatctctcggaattaactttctgttttaacggatattttattctgatgggaaaaatctcatctcaatgaataaatgccctgcaaacatactggttgcaatacaaggatgacggtgacaaacagaattaactggcttgatacgccctcgcgttttggtttaatcagtcggacacttcattggttgatggctttgttatttttatggcaatttttcagcgtgattgtctggcatactttcggacgcaccgcatttaccttgtggatggataaacagggttcccacgcaaccgtaggctttttgctatttatcctggtaataatacgtgctttatggcgtgggtttaatagacaccgttacccgctttcgaggccaaataaagcgaacaagatcgccattgttgggcatattacgctttatttattgatgtttgtgattccctttttggcccttctccgctgttatgctgatggcaaaggcgtggttgtcatgggcatccctgtgttgccagccacggggattgaaatcaaagggattaccgtttggatcgatatgatgcatgggccactagcatggctgctgctcttttgcattggcggtcatatcctgatggcaataattcacagttttatacgtcgggatgctaatctccgccccatgatttaagtagaggcatcgattcaggatcagggtggagcttttctattacaccctcagcaatgtggcagaataacatttgaacaaggaaccgaacgacatgatacctaagacgaaattgaggaaaaaccttccctacgttttgatcggactcaatttactttttacggcgcaggttcatgctgaaattgacgatcggcgcgtgattgccgactgcaaaaaaattccttcttacgctaatgcaggaaataccgcctatcaaaaaggtgattacgttacagcgcaaaagcattttatgaatcaggttgcctggacagaagcctgccacttctctgacgaggtaaaagtagatagcggcgcccgagctacggcttataacaatatggcgctaacctatattcgtcagggagatctgcttaaagcaaaagcctggttaatgattgctccagaagataaaaaatcgcaatataacctgaagcttatcgctgataaaatagccgcattacctaaaccgacaacttatgctggtgaatattggcaatattcaggactgggtaattggaactccattgaagtcacgccaaaaggtaataaattcaccatagattacaatggttactattttggtattatgggcatctactatggccctaatatggggcaattctcttttgttagcagtattccagctgatggcaaggtagaatacgaccagagtaaagcagataaagaaactgattattccggtgactgcaaagttaatatgcaatttactcatgcggatgtgactgtagaaactgcgggtgactgcggatttggtcataacgttagcgctgatggcaattatattcgcgtcagataatcactgtttattagatcaggcaatcggtatggttgcctgcattattctattctcattcctctattccccagcaacacctcatcttataacgtaatgaccgagtaaatgtaggtatttataacgaaagctggcctatttacctatgaactaaataaatttaatatacttaatgtttttaaagcaaaaataagcaacataattatttatttaatactaaataattaacaattaatttaaaatagtgatcttgatcacgttttatttgataaatatagatagtatgaattttgagcacatcagtgcttgtctatttaaactgcaaaggagtgttaatatgggatatatggtttcgtttaatgctaatccagtaaatgcgtcagaagagagccattcacctcaggaagttcatttgactcactctgagaccgaagctcttaaggatgacgagtaaatataagtagtcattaacatactgacaactaagttatttgtctcttattttaatgactaaaaacattaagcgccgatagtggcctcatcggcgcttaaataactccctttccattaatagtatcatttaaccgaaaattccccacatgactgcttgctattccagggaggaattcctatgcgtcctattgagcgcgatttcacattatccgatgcaaaagatcgcgttatcaaagaaattgataatctgggtttgatgtggcgtaaagaagtttacggaaagaatattctgacgattgttgttacgttaaaacatccaaagaataacaatcaaacgatgggcgtaggtaaaggagattatgacaatgcttttgttggggcattatttgaagcactggagcattatattgaggatttttcctctcctctagccacagtacggcctgcaaagactctgatgcgtaagggaatactagctagtgacgatgtgctggatatgattagcactcaacctgatagtcatctggctacgcgccgcttcgcctctaccgcgggagatttttattatccattagcgctttgcgatcccaattattcccgtaaacctcttgccgatgataattttgactatcgttatctcgctcgctatggaagcaatagcggcattgctattggcgcaaaccgaaacgaagctttattacatggcataaatgaatgtatagaaagggatgcattatctttgtttcttatccagggtttatacagccgaagcccatgtacaatatatgaaattgataagcagagtttaccggaagacgtcgcacgcagctggcaaaattcagaagaggaaattcaacaaaggatacgagtactggatattactcagggactgaaatgtcgtacttatctggcgttagctgaaaaatcaaaactaataaaatatccaataggctgcggaacatcgctacatccgcaccacgcattgcagcgagcgttaagtgaattggtacaaatcaatgcggtatttaatcatagccaagagattcaacgagagaacgaagtattgcatcagcggttattaagatacaaaaaattagagcgttgtttttgcatgcgaaccgcggatatttttaacaccaatgaagtcttactgtgtcgcctgccagtttcagaccacgcagacagtcgccccgccgaagatcttgtcgagatagaacaggatttaattgaacaagggtttgttatcgggaagagtattctctatgaaacttctcaggtgtgtctaaccaatgttttaattcctagctttgaacgcttttatattattaccagcgggaatattgttttacctctgttaagaggaaggaggtctcttgaaaaaaaaactatctaaagatgattttgccgtcaggtggttaatcagagaacatcaatatattaaacaccagaaacagataggggatattcccgaaggcaatatagtgaccttaaccgaagaggttgaccttagcatggggagttatttcctggcacatgcggaagaggaatcctggctggggcgaaaatttatatgtgaaaatgaattaggtcgacaaagctggcccagcgtattaagcgatattaatttattaggtccgttcaattctgccagacgggaaggaaaccatgtcacgttcagttatattgccccctcttctcgccggcgctctagttttttccaaagcctattaaccgaccctatgggcgaaattgatttttgttttattcgcgattttgacggcgcacttccctctggcgataaattttggcaagttgaccacctttctgctgagagaatggctagggaagaacgccattttcagatgcacacagaactcagccttaaggtgttaaaaacccagggtgttatttacgatcccgcctgttctaccggtgattttctggcatccctggctaataaacttcctgagtttaattatattggttcagatatttctcctcagatgatcgaatttgctcgtgagagacataaggaacggcctatttctttttccgttggcgacgccatgtcttcccggcaacgctgcgatattcttattctgcgctttctgaatgatgaagtgatgcaaataggtagcgcggcgctcgcttttaatcatttgatcggcctattgaatcccggcgggatagcatttgtttttggtcatactcccgtattggttcccatcacagacctggcctcggcgcttggatttgaggtaataaagaatacggccagctcactggatcagtgccacatatttcagttttatatgttgagaaaatacccatgacgcaagtgcgtagctcaggtttcttcccggttgatgatctgcactccatatattgggagcggcatggaaatccgcagggcgaaccttggatcgttctccacggagggcctgcggggcaaagtcatcttattcatacggcattttttgatttgtcactgtgcgacgttttaatttttgatcaacgaggttgcggccaatctcttccttacggcgagcgaagaatcaataccatcaaccatctggtggaagatattgagaggcttcgatgttttttaaaaatgccgcgtgccaatattttaggtctctcctggggctgttggttaggcattttatacaaaattcgctatggcatgagcggtttgaaactggtaatcggttgcccttttattcctattgcgactgtgcaggagctgcattggttttatttccatcagcagatctgccagacgcataggctaaaaccttttatttttgctgaaaaccaacctaaatcggccacctactatcgctgtttacagattttggccacgggcctagccagtcagaagagatctatggctcaactttgggtgaataccgatgaaatcgcgacaaatgcgcaccaggatttccatcagacaatcacgttaaccgatgaatttttcaatccgcgaacttattccgccatcatgctagaaattcattaccatgccgccggattttttattaccaacgatatattgcgacaagttgcgcaaatggacgctcagggtgtcactctcgtttgtggtgaaaaagaccgaatgggtatggttgcaaccaactggttagccgaacgggttaacgttgaggtaatactcgtgcgggatatcgctcatcaggcgcttcatacagaaatgattaaacaactccggcatcttattgcccgatagacatcgcgctataggcagagagtcaacgataaaaatccccgcagccaacgcaaacggggagtatattatttccaataaaatcaattattacttcaacgccattacttcaacgccattacttcaacgccattgcatcacgcatggtaaagaacaggtcggtttggtcagttagacccacgacgttagccgcgtgagggccataggcagcaatgcgtagctgcgtgccggtatgaccttgagagtcatcttcggaattcccataactgatcgccatcaccgcgccatctttggtcattaatgcctgcgtcaaccccggcgccttggcatcggcctcgacgatctggctggaatgagcatggtcggcggtcacaatcaccagcgtgttgccgtcggcttttgcgaactcgagcgctttttgtaccgcttcatccaaatcaacagtttcaccgaactgaccacaagggttcgcggcatgatcctgtttatcaattgacgccccttctacctgtaggaagaaacctttttcattggttttcaacacttctatggctttttctgtcatggcggccaacgttggaatatccgcagtgcgttccggattcacctcgcaggtgactggagatttatcgatattaccgtggtatgacgccttcgggcctaaccaacgcactggcatattacccgccgagaataggccaagaacgggtttatcctgatttgcctgagttaccccattgagatcattcagactctcaacaatcagataaccgcgggcaatagcctggtcgcgcaaggatttatccttccactcgccggccttagccagttgctcaaaagattttgctccgccgcctagcgtgatatctgcccgggcttggatcatttgctcggttatcgaacctcttccgccgttttccagcgcattggtcgcgcatttttcgctagtttcttcagggccatagcatttgcgaccggtaacgtgagcaaactgagcggcaggcgtggcatcttgcaactctgcggtagaaacgttgccagtggctttccctgccgctttcgccagttccagaatggtgatgtgatctttgcctgtaacatccacacccaacgcgccgttataagttttaacgccgcttgaccatgcggtggctgacgcagcggaatcagttacataattcggtttttgcgtctttttgtctaaagagtaatgcgtgtattgacccgtcagtggcaaggcatcaatgcctttgaagaaaccgccggcacccgccgcatagttacgcgccgaggtgatttcagaatcgcccattccatcgccaatcagcaaaatgacattttttacggttttatccgataaagagtcgcgtaaagcctgcgtctggtcactatctaatcgacgagctccgccgaactgagtgatgtcgcctttcgcggaacggtcatataagcccgtttctgcggcactggcgttaggcatcagtaatgtgcaactggtagacagcaacagcgttgataatgcgactcgggaagcggtagaaatgcgctttgacatcggtagagttccttttgtaacacactaatacagtttgtatttattggttacattggatactagagcagccggatgacgtttttatgacggcttatgttaattatttcaccctcatttttaatcaaactactttaaaaaacatcggctcaattttactaacagaaagcggcattttgccgctctggcatgctttcccatgttccctatttaccgacatccctgcctcactgaaacatcaccatatttatcaaaaagttaaaccagtaagggcagaatttagcgagtaggaaagtattcactccgcggagtacgagttactcggtgtccatcggtctcactgactgatagatatcaatatcgaaataaccgtcggccattccgtcattcaaatagacctcaaaacacgcaccttctgccgggaggtagccactggcgggtaaatgcaggttatacaactctccccatgccttggcataatccccatcggtcacccgcgcacgataaaccgcataagtcccaccaggtattatttgtaaaagcacaccactgctggcatgcgcgggcaagacaaaatcatcggccacagaaaaagccacatcagcccgcagattggcgggtggcgtggtttcagggttatcccaataaagcgctagccaggattcatagggtaacgggtgctgctgctgccaggatgataactgtttgaaaccaagaggaatggtttcggcgtaagggccaatcacccgaatactgacaacttgctgcggctgtttttcaataatgcgaaatgtcatcgtagcggcctctcaagataagatttaggaagatctctcttctcacgaacggtttcaaatacgatactgagcctgattgaacgtgagtaaatatcaatgcgtcgtggtactgtataaataaacagtaccacgatattatctgaatatcgctcatttatacagcgttaattgcgctatttttgttctatttcgcgccaattgcctcatcaggcaagcgctcgccagcacgttgttggttggcggttgtttattttggaccgatttcacccaattgactcttccttaattcgcgaccaactcgccgcacaatcagcaacggtcactaaattgttgccacagttgcgttagaatacgcgacaatttttctgcccattgctgttgtccaaaggatggcataaggttcgttgaccccgacctgtaaatcgccttctgcacgtaataattcaaccagcaataaagcccattccggattgcggttaaacagcgtaccgatctgccaaggtctggccacacctttaaaagttggcgtaaaactatgcatagaaatgataacgctaggttgcccttgggctgcgcgtcgatccagcgtttggcgaataagatcgtggtaaggctggaaaatttcggttctgcgggcttctgcctgcgcgggggtgacactttgattgcctggaatcgtggtttgctcggaaatttcagggatagaactggcgataccgggagtacggttacagtcgatgaccaggcgagaataacgctgatggattaaggtggcatccagcagctcactgagccgttgagctacgggtaaagagccgatatcccagccaatatgtcgatctatttcgccgggcggtaggcctaaatcacctaatcgcgaggggatagtttgcccggcatggtcagccaggaaaatgaaaggagagactgcacaagcgcgttctagcacggccggcgagcaatcctcagcggttaataagggctgcgggcggtcaactgacatctttctgactccgatagattaggcaaaacctcatcctagtcgctatttaaggctatgcccagtcacggctgataacctggcataatcagtttgaaggataaagactaacgctttgtagttaatcagtgcgaaccacttcgcattgtcaatgataggcggcataaaactgacagaggctattcaaaaacgccggtttttcgtgccatactgctgttgataaaaccagtagataacccccacggagccttatggaaaccttttacattgaccgtactgacaccccagcaggtgaactggtcattattggcgatagcgaacataacctgcgcgccattgattgggtcgatcactatgaaagactgctgaaattactgacgtctcactatgggccaaatacttttacgctgactgaaaagattaatcctggcggtttaaccgagaaaatgcagcgttactttgccggtgagctggatattatcgatggcctgccggtaaaaactgcggggacggcgtttcaacggcaagtgtggcaagagttgcgcaacattccctgcgggaaaaccatatcctacggcgaattggctcaacgaattggtcgccctactgcttcccgcgccgtgggcatggctaatggcctgaacccagtctccattgtggtgccctgtcatcgcgtcatcggcgcgtccggctcgctgaccggctacgccggtggcgtagagcggaaacgttggttattggctcatgaaggttatcttttagcgcgctaagcattgttactcttatcagacgccttaaaagatgttaaaattgacaaatatcaatattaatgggaataccctcatgatcccggaaaaacgtgttatccgacgtatccagtcaggtggttgcgcaattcattgtcaggattgcagcatcagccaactctgtattccttttaccttaaatgagcacgagctggatcagctcgacaacatcattgaaaggaaaaagcctattcagaaaggacaggcgttgttcaaagctggcgatgagctgaagtctttgtatgctattcgttccgggaccattaagagctataccattaccgaagaaggcgatgagcaaattaccggtttccatctggctggtgatttggttggtttcgatgcgatcagcaatttacaacacccgagttttgctcaggcgctggaaacttcgatggtctgtgagattccgttcgatacgctggatgatttatccggcaaaatgcctaacctgcgtcagcagatgatgcgtttgatgagcggtgaaatcaaaggcgatcaggatatgattctgttgctatcgaagaaaaacgcggaagagcgtctggccgcctttatctataacctgtcgcgccgttttgcccaacgtggtttctcacctcgtgagttccgcctgacgatgacgcgtggcgatatcggtaattatctggggctaacggttgaaaccattagccgcttgctgggccgcttccagaaaagtggaatcctcagcgtaaaaggcaaatacattaccattgaaaataccgaagcgctggcacagctcgcgggtaacccaaaaccggtgtgctaatctgacctaatgccagatcaataatttgcatatttattggtctggctctctatcccccctgttctgtttttccatcatggtttactctgtaagtaacacactgttaatagtgattcgcagttgtaaggagaccctatggcaaagtatcagaatattctggtggctattgaccccaatcaggacgatcaaccggcattgcgccgagctgtttatctggtgcagcgtaacggcgggcaaatcacagccttcctcgctatctacgatctttcttatgatatgaccaccctgctttcgccagatgaacgaacggcgatgcgtaaaggcgtgatcagtcaacgcgcagcctggattgccgaacagtgtcgtttctacgttgaagcgggcattcccattgatattaaagtggtttggcacaaccgaccctatgaagccataattcaggaagtcctgagtgcgaagcatgatttgctgttaaaaatggctcatcagcacgatcggctggaatctattatttttaccccaacagattggcacttattgcgtaaatgcccctgccctgtgtggatggtgaaagatcaaccttggcctgaagacggtacggctttggtggcggttaacctgtccagcgaagatccacttcacgatccgctcaacctcaaactggtacaagaaaccaaagagctggccgagcatgttaaccaaacggcggtgcatctcattagcgcctatccggtgacgccaatcaatattgccattgaactgcctgattttgatccgagcgtatataacgatgctattcgcggccagcatttgatagccatgaaagcgttgcggcaaaaatttggtttggacgagaaatacacccatgtggaaaaaggtctaccggaagaagtgattccggatctggctgagcacctacgcgctggcgtggtcgtactgggcacattggggcgaaccggtctttccgccgcttttatcggtaatacaaccgaacatgtgatcgaccatctgaaatgtgatttgctggcaatcaagccggatggatttacctgcccagtggagtgtaatgaggatggtgacggtctgtcatccaacggataacgaccactaagcttagcggcgataaatttagcgataacctcttcaataccaaagccagtctgtgaaaacggactggcttttgcttagtgagctaactcaaaacgatatcaaaacgataggttgtctgctccgcaccggtgccgataaatcaggcacatccggtgcgttccctacccttgaaaattcccttacagcagtgtaatagcaggtttttagccttagcctttggctgataaaaaggacgccagtcgctccagcgcctgcttgcatcgagtattcattcagctacaggaaggctttgtatggcagctctggctcatcgataaagatatcgtggaagcctcggttatgctgataatgcattttatgcttgtccgttggataggtgtactttccgccgacttgccagaagaacggcgcaaatttgtagtccaatcgatcttttttcattttccacagtacctcgatttcacgagtgtcactttggaagttagcccagatatcgtgatggaacggcaccactacctgcgcattcagagattcagcggcgcgcagaatatctgatgaagtcattttatccgttacaccgcgcgggttttcaccgtaggacaacagcgcgacgtcaatatcgtaatcgttaccgtgtttagcgtaataatttgagtagtgagagtcgccagaatggtagatcgtgccaccgctggtttttatcaggtagttcaccgcacgctcatccatggtatccagcagagccttatccttggaggatgtgccttttggtaatgtaatcagtgcagtacggtcaaaagagtccaacacggtgatttgaatatcgccaatatcaatcaccgatccaacttttgccacgatgcagcgttcttccgggacgccccagccaagccacagattaacgcaggcctgcgggccgataaatttcacatgatcgtcgcagttttgcagcaccgcggcagcgacgttgacgtcgatatgatcggcgtgatcgtgagtagccagcacggcatcaattttcttgatggcaaaagggtctaatacaaaaggcgaagtccgaagatttggctgtaatgcccgcacgccgcccatacgcatcatttgatgttgagcattcatataaggattagactgcgttcttttcccagtgccacaccaaaaatcgatagaaatgttggtatcaccggcggatttaagccagataccggtacatcctaaccaccacatggcgaaagtattgggttgaacctcggttttttcgatttcttcatttaaccaggttccccactcagggaaagtgttcaaaatccatgactcacgggtaatctcgtttactttgctcataatcagacctttaggataaagaaattagaccaaaatgacgtctaccccctgcgctttcaggctgctgataacctctggatttgcatccttgccggtaatcagaatatcgattttactggctgggcaaaacagtaaacccgtgcgctgccccactttggagctatcaacgaccaccaccagtttgctgattttgttcagcatctgctgttccgaaactgcggttaacatatcggttttatacagcccggtttcattgagcgccttgccacttgtaaacatccatttgcctgcataagcatcaaaagttgtcgaggtagggttaagaataatattttgcgttttgttgtattgacctccaataatgatcacgcactcgtggtcgttctcaatcagataacaagccagcgggaagtaattcgtcacgatttgtacgtcgcgcccgcacaaagtttgtcccagtaaaaatgcggtggaaccgcagttaagcactatgctgtcaccgtcctgacatagttccgatgccttggcggcaatgcgtgatttttcttcatagttatcggcgttattaatgttcagcggcgaccaggcctgcttctttttatccacgatgcactccgcaccgttgcgtacctttcttaactgtttcaatgcatccagcttggcgatgtcacgtcgtgccgtcgcgggtgaaatatcaaaacgctcaataagatcgttaatagtgagagaccgcttcgcatttacccaagccacgatttcatggtgacgttgcatttcattcatttcagtcatcctacgataaccgctcacatgctgattacatggtgattggttttgatttaaattgatcatatacgtgagaaaaataactgtcaatgtcataatattcaacaattgaatggctactctctcggtatacccttaatttctttatgcaagaaaggtcatttattacttatcacaatctatttatatgtttattttcaatgccttaaagtaattacataaccacgaagcccttattagtgtgagtaaaatcaaattaatcacattgaatcattgaatgatcacctttgattatatagcttgttgttgtgtcatgtattatccgagaaatggatctctacagggcggtggcaaagattccgtccaaccatattagtgtcagggggtggtatggagtatctgtatgatgtgttttatatcttctacagccaggtcatgaccaaagcgccgttgctgcttggtctggtgacttgtatcggctatagcctgctacgtcgtgatatcacaaccattattaaaggaacaatcaagactattgtcggttttatgctggtacaagtcggcgcaacaacgctggtatccagctttaaaccggtcatcgaaaaaatggccgaattccacggtctgacaggatcggttatcgatccctatacgtcaatgatgacaaccatggaaaccatgggcgacgattattcctgggtcgggtacgtggtattactggcgctggcaatcaatattctgctggtggtgctgcgtcgctacaccgggattcgcaccattatgctaaccggccacattatgttccaacaggctgggttgatcgcggttttctactttgtgatggcggttcctatgtgggaaaccgtgatttactcatcgattctcctcgccctttattggggtattttctccaatattatgtttaaaccgacggaagctgtgaccggcggcgcaggtttctctatcgggcaccaacagcaggccgcctcctggattgcggtaaaagttgcacctaaacttggcgatccgaaagataacgtagataatctgaagctgccgaagtggctgcatatattccatgacagcattgccgccactgctatcgttatgacgctgtttttcggcgtaattttactctctttcggcatggataacttgcgttcgatggcgggcagcactcactgggccatctatatcctggagaccggcctgaaattcgccgtagcaattcagattattgtgaccggtgtgcgtatgttcgtggccgagctgtctgaggcttttaaaggcatctctgaacgcgttattcccaatgcggtactggcgattgactgcgccgcgatctacgccttctcccctaacgcgatggtatttggttttatctggggcgctttagggcagttcactgccgtattggtgatgctggccttcaatacatccatcatgattattcccggttttattccgatgttcttctccaacgccactatcggcgtgtttgccaaccacttcggcggctggcgtgcggtcatgaaaatctgctttgtaatgggaattatcgaagtattaggatctgcctgggctattgatctgtttatgcagaatggcactaccttcaatagctggatgggtatggccgactggtctctgctattccctcctatcatgcaaggtttatctgcttcatccttaactttctacctgttgatcgcactggcgctggtttatatgttctttgcctcccgcactttacgggctgaagaagatgcagctaaagcgctggcggcactcccccctgcggtagatgaaaatccggccgaagaggcaaaacccgaacattctaccgatgcgcccagcgtcgaagccgctaaaccggttcggattctcgccgtctgcggcaacgggcaaggttcttctatgatgatgaaaatgaagatcggcagctatctagagaaaaaaggcattccccatcacatggattcctgcgcggtttctgactacaaatccaaactggctaataccgacattattgtttcgtcaaaacacttgtcgagtgaaatggaagttggagaaggtaaatttattcttggggtacaaaatatgctgaacccacattcttttggcgaacagttgcttgctctgattgagcaagttaaccaacaaaaataacctaaattttaattttgatgacacaccagagctaaccggggagatatcactatgaccacctcatcactgaaaagctcgttgatagaaaaccgctccatcatgttacaggcgcaggccgaagactggcgcgcggccatcaagctgggaaccgatatgctgattgcctcaggtgctgtgacgccggcctaccatcaggccattatcaacagcgttgaaaagctcggcccttatatcgttattgcaccaaattttgctctgcctcacgcccgaccggaagacggcgtaaatcgcacggcgtttgcgttagtgaccttaagcgaacctatttatttcgacggagaagacgacgcggtggatgtgctgatcaccctcgcaggcagcagttcggatgagcatatggcgggattaatggaggttactcaggttctggatgatgaaaacagcgaaaccggagtcgatctcgacaaactgcgccgctgccgtagcaccgaagatgtttatgcggtgattgatgcggcgctgcgggtgtgacaaggagaataaattatgtatcaagctttgaaacatcgggtgctggaagccaacttgctgttgcctcgctacggtttagtgacctttacttggggcaatgcttccgagattgatcgaaagcatggcgtcatggccattaagccctccggcgtggaatatgaccagatgaaagccgaggatatcgtggtgctggatctggagggcaaggtgatcgagggcgatttaaatccctcgagcgataccccgactcatcttgagttatatcgtctctttccggcgctgggtggcatcgtacatactcactcgcgctacgccactatttgggcgcaggcggggaaagatcttccggcgttgggaacgactcatgctgactatttttacggtgatattccctgcactcgtccactaaaagacagtgaaatcaatcagaattatgaaagaaacagcgggctggtgattgatgaaaccttcagaatgcgcggaatcgatccggtagccgtacccggcgtattgctctatgggcacgccccctttacctggggaaaaaatgcgcttgaagcggtacataacgcggtggttttagaggaagtcgccgccatggcgctggcgacacgctcgctcaatgcacatattcacctgcagaatgctttgtcagataaacattatcgacgtaaacacggcagcaacgcctactacgggcagcgctagccgcaccacgctcctgcttcgctatcacatcggcatctggttaacggatgccattgactgaaaaggactatcactatggccaaacctatgcttcaaatcgccctggaccaaaccgatctggccagcgccgtgactctggcaaaaagcgtcgcgggttacgtcgatattatcgaagtcggtactattctggccttcgccgccggaatggaggcggtgacgacgttacgccaaaaccatccgaatcacctattagtctgcgatttaaaaaccaccgacggcggcgcgattttatcgcgaatggctttcgaagctggcgcagattggctgacggtttccgccgccgcgcacatcgccacgattgaagcctgcaaaaaagtagccgatgagttgggcagagaaattcaaattgaaatctacggtaactggacgctcgatgatgccaaagcctggcgcgctctgggtattaaacaggccatttatcatcgttccagagacgcagaattggccggcgtgggctggagcgatgatgacctacttcgcatgcgcgctctgtctgatttaggactggaactctctataaccggcggcatagtaccgcaggatatccgcctgttcgaaggcattcgagccaaagcttttattgccgggcgggcgttaaccggcgaaaaaggtcagtccaacgcgcaggcattacgcgctgaaatcgataaatactggtcgtaaccgatatggcccgggaggctgataatgtatacaaacagggtaaaccagattgtcgggatctatgagaaagctctccccaacgccatgccgtgggaagaaaaacttagagtggccaaatctctgggctttgatttcatggaaatatcaatagatgaatctgatgaacgacgcgtgcgactggattggtcagacgagcaaatctatggcctgcgtcgcctgtgtgaacagtatcaaattccgttacattccatgtgtctcagcgctcaccgcaagtatccctttggttccgcagataaagttattcgcgaacaggctaaaatccatatggaaaaagcgattgattttgcttacaagatggggattcgcgtgatccaattggcaggctatgacgtttactacgaaagttctaacgaacatactcaccagcgttttattgatgggatgaaatggtgtgccaaacaagccgagcgcgcaggcgtgatgctggcggttgagattatggataccgactatctgaattcattgagtaaattcgaaattctcaagcgggaaattccctccccttattttatggcctaccctgacgtgggcaatattaacggctggaattacgatacggtaacggagctgaggctaagtcgcgaccatatagtccagattcacctgaaagacacccttaaggtcagagaaaatgcaccgggccagttccgcgatttggttattggtgaaggcgaagtggatttcaccgtcattttccgcgcgcttcgagatatgaatagccgtgttccattggttattgaaatgtgggcgcaggatgaaaactggcgcgaaaacattctcaccgcgcaaaaacagttgaatcaggccgccgaacgtgccaacttcccgctgtatttatccccgttatctcactgatttattgatataaaaaatccggagacagttgcgctccggatttttgttttgttgcttggaattcgtttttaccgttcaattcaaggagccgaatcttcttcccgctccttttcttaacgattacaacgcgcgcagaatggcttccacactagctttagcatcgccaaacagcatttgcgtgttgtccttgaagaacaacgggttctgaacgccagcataaccggtattcattgaacgtttgaacgcaataacattctgcgctttccacacttccagcaccggcattccggcaataggactgcgcggatcttccaacgccgccgggttaaccgtatcgttggcaccgatgaccagcacggtttcggtctccgggaagtcttgattgatttcgtccatttccagtaccacatcgtacggtaccttggcttccgccagcagcacgttcatatgacccggtaaacggccggcaaccggatgaataccgaaacgaactttgataccgcgcgcctgcagtttggcggtgatttctgccaccggatactgcgcctgtgctaccgccatgccatagcccggagtgataatgactgagctggagtttttcagcatttcggccacgtcttccgccgtcgtttcacggtattcgcccatttcttccgcatcaccgacggacgaaccgtcagtaccgaagccaccggcaataacgctgataaacgagcggttcattgccttacacataatgtaagacagaatcgcaccggaagaacccaccaaagcgccggtgacgatcagcaggtcgttgctgagcataaagcccgccgccgcagcagcccaaccggagtaggagttcagcatggaaaccacaaccggcatatccgccccgccaatggaggccaccagatgccagccgaaagccagcgctatggcggtcatcaggaacagacaaatgccctgcatcgctacgctgtcggttttcacaaacagcaccatcaacaggaatgacaccaccaacgccgccagattcagcttatggcgatgaggcaaagtcagcggtttagaagagataatcccgcgtaatttaccaaaggccacaatagaaccggtgaaggttactgcaccgataaagatgccaaggaacacttcggtcagatgaatgttctgcatcacaggctccattggtgcgccgtgatccagataactgttgaaaccaaccagtaccgcggccagacccacgaagctatgcagcaccgcaaccagctctggcatttcggtcatttcgacttttttcgccagataaataccgatggagccaccgataaccatagcgacaataatccagccaacgttgccggaatccggccccataatggtggcgatcagtgcaatggccataccggtaataccaaaagtattaccctgcttggaggtttcgtggcgggataaaccggccagactgaaaataaataaaatcgcggcaactatgtatgcagctgttacgagaccactagacatcagttaccccttagtgtttacggaacattttcagcatgcgctgagtcacggtgaaaccaccgaaaatgttgatgctggcaatcagtacggcaataaaggataagaaacttacccagccgccgtggccaatctgcaacaacgcccctaccacaatgatgcccgaaatagcgttagtgaccgacatcagcggcgtatgcagcgcatggctgacgttccacaccacgtagtaacccactacgcaagccagagcaaacacggtgaagtgtgacaaaaactctttcggcgccacgttggccagccagccaaacagcacgatggcgatcgccataaagatatatttggtccagggagacgaaggtttagcctgaggtttttcaatcggagccgccgcttttgccgcctgaggctgagcagaaacctgaattggcggcgcaggccaggtaatttcaccggttttcaccacggtaacgccgcgaatcacggtatcctcgaaatcgatatcaatttcgccgttcttctctttgcacagcagtttcagcaagttaaccaggttagtaccgtaaagctgggaagactgggttggcaaacgacttggtaaatcggtgtaaccaataattttaacgccattatcagtcacggtgattttgtctgcgacggttagttcgcagttaccgccggtttgtgccgccagatcgaccaccacgctgcccggtttcatcgaggcaaccatttctttggtgatcagcaacggagcaggtttgcccggaatcagcgcggtagtgacgataatgtccacttccgccgcctgcgccgcaaacagttccatctctgccttgatgaaagcttcggacatcactttggcgtagccatcgccgctgcccgcttcttcttcaaagtccagctcgaggaattcggcccccatactctgaacctgttctttcacttccggacgcgtatcgaaggcgcgaacgatagctccaaggctgcccgctgcgccaatggctgccagaccggcaacgccagcaccgataatcatcacttttgccggaggcactttacctgcggccgtaatctgcccagtgaagaaacggccgaattcatgagcggcttccacaatggcgcggtaacccgcgatgttggccatggagcttaaggcatccatcgactgcgcacgtgagatacgcggcacagaatccatcgccagcaccgtcacttgacgttctgccagttttttcagcaattctggattttgcgcaggccagataaaactgaccagcgtgctgccctcacgcattaaggcaatttcatcctcaaggggcgcgttaacttttaggatcagatccgattgccacacattcgccgtatccgtaattgtggcgccagctgactgataagccgcatcgtcaaaactggccagtcgcccggcatctgcctctatggcgacggtaaagcccaacttcagcagttgttccaccgttttcggcgttgctgcaacccgggcttcattggccaaccgctctcttggtacaccaatacgcataatgttcccttttagttctcttcgatgatgagtgtgtcgtcatcctgcctatagttgtgatttcgttacgccgaatcttcgcgccgccgaaacctgcttgctacagcttcctataacctactgaaaatgtgactgatgatccatatttgtctgcatcacattaacgctttttgcataaaaactgatagccaatgggaagattgtataaatgactatcaatattatatttaccagagtcttatcctgccatttatggttagattaaatttattccatccattctatgaatccagtaaatacgtggcctgaggttagcaaaatgtaaataaatcgagcttatgtcgttaattgtattattatcaaaacttatctgtattagcgggaaagaacgccattgattgccggtagtaaatagtcacactgtgcggcataaattgctgagacacctgccattattacatgtaataatcatcggctattctgttacacatcaatagttctgctcgtataacgttaatgcgcaaggcgaaaggattttttatgaagctgaaatacacgatcatcgcgtcagcattgctatcactgactgcattttctgctgcacaagccgcgcaagaattagcgccggaaaaagcagcctccattaaaccgttccaacgtataacaattaccggtcggtttaacgcaatcaatgaagcagccgctgcggtgtcacgtcgcgctgacgcattgggcgcagacgctttctatattcaggatactaacagcaataataacggcggtaactggcgtgtaacggccgatctgtaccacaaagatgcggaaaaagtgagtcaagagactcaataccgcaccttcaacggcgtaaaagagctgccgaagaacgaagcttatctgctggagccttttgataccgtgtctgtcagcggcttcttccgcagccaaccggatattaacgacgcaatctctaaagaagcgaaaagaaaaaatgccagcttcttcttcatcgtgcgtcaagtcgatgccaacggcggcggtaaccagtttatcaccgcttacgtatataaagctgatgcgccaaaacgtaaggtgcaaagcccggacgtcatccctgctgattccgacgcaggccgtgccgcactggcagcgggcggtgccgaagcggctaaagttgaactgccgggcgttgcctcttctggtacgccaagcaatgccgtgggtcgcttcttcgaaactcagtcttcaaccgggaagcgttacactgtaactctgtccgacggtacgcaaattcaggaactgaataacaccactgcggcacaaatggtgccctttgattcagttacctttaccggtcacttcaacagtatgaccgatgtttcgcaagaagtggctaaacgtgccgcagcgaaaggagccaagtactaccacgtgactcgtcagtggcaaaacaaaagcggcggcaacctgaccgttagcgctgatttgttcaaataatctttgcggggccgcctaaggttgccccgttttacttttgtttccgccattctttaccctcttcccgcccaacggcctttctggttgcgcaaatcctgaacgactgaataactttttatcctaatcgcataaccaatcattgcatccacaccccgcactccgtaaaatcttggcactttttagggctattatctttcagctatcggtgccgactccccatatcctgctagttgatagctgacatccatagattaattctttaaataccaggactgctagcattggaaaaaaaactcggcctaaccgcgctaaccgcacttgttctcagctccatgctaggcgccggcgtctttagcctaccgcagaacatggctgaagttgccagtccagcggcgttacttatcggttggagtattaccggcgtagggattatcttcctcgcctttgccatgctgttgttgactcgcctcaggccggatctggatggcggtatctttacctatgctaaagaaggctttggcgatctggtcggctttttctccgcctggggttactggctgtgcgcggtgatcgctaacgtgtcttatctggttattgtgtttgccgcgctgagctttttcaccgatacgccagatcacatcgtttttggtgaagggaatacctggcaagcattgatcggtgcctctttcctgctgtgggtggtgcacgccttggtattacgcggcgtacagactgcggccagcatcaatttggtggcgacgctggcgaaactgttacccttaggcggttttattattctggcggcgatcgcctttaatctcgagacctttacgctggatttcagcggcatcgctttgggtacgccggtgtgggagcaggttaaaagcaccatgcttatcactctttgggtgtttatcggtgtggaaggtgcagtagtggtttcggcgcgggcgcgaaataaaaaggacgttggtcgggcaaccatgctggcggtgttatctgcactgagcgtgtatttgctgatcaccttactgtcgctaggcgtagtaccacgcgccgagctggcagagatgcgcaacccatcgatggccggtttgatggttgaactgatggggccactgggtgaaatcgttatcgccacgggtctgattatttcagtctgcggcgcttacttgagctggaccattatggccgccgaggtgccgttgcatgcggctaaacatggcgctttcccgaaagcgttttgtcagcaaaataagaataatgcgccatcccaatcgctgtggtttaccaacggcgcggtgcagattgcgttggtactgatttggattaccggaagtaactataatacgctgctaactatcgcttctgaaatgattttagtgccgtatttcttggtgggcgcatttctgtttaaggttgcgctaaaacgtcaggattggcgcttgattgtggcggccagcggtgcctgcttatacggtttatggctgatttacgccgccggtatgctgcatttgctgctgtcggtattattgtatgcgccgggattattggtgtttatttatgctcggaaaagtcaccatgatatgcgcatcttaaataaaatggagcgcgtggccatttgtctggtaatggtcgctaccctgcccgcgacctggttaattatgcattaatttctaatatgttcagctatctacatatgttagtaaaaataaaatgtcagtaaaaataaagtagatgctgaacagccttttgtagcagaaatgcatgaatcaaaattgatattgaggtggcaagaagcccatcgattaatagaaaatttggagagaatcacagttggaggcagtttcgaggaagcagtaaagctaataaggctgcttttcatggaaccaaggcattgataaaaacaatccaagcatcgaaaaaatctcattacccaagggtatcaacaccatctgactaacaatgagacgttacaggatagcaacgatagactagatgatattgagcaacgcataaataacggaaaagaaaccgagcatcaaattcaaattatcagtgagcaaagccgaacttttgctgaatttctgagtgatagaatataaagataaaatggccaagagcgacgcttgctcgccatgaacagcatatttaaggctgaatgacgggcaaattaaccagcaaccgctcgccgtttaacgtcaaagcaacctgcggtgagcactgacgtgaaatagccgccaattgaccgatatccaaaccatagggtaattggacttccagagattgaatcccctgttggcgtgccaaccgaattaaccgaatcatattggtttcatcgctcacctgtgtagatagcacctgcaaagctaaggcggttaactgctcttgtgggttcttttctgattcagtttgagattttttttaccaccatgccgaagataggcattacaccataaatcgcatcgacaaaactccagcgttttttgcaggaagccgatagaaatttcatgtaatcaaagcagatggtttcgcgctgtatccgctcactactcatcccctaatcctctcttaattcaaaatagtgttggactacggctaaatagagacgacgtgacagtcagtgtcaccaatataatgacataattcccttactgtttaccagacggagccgacgctttaatcatacgaatgaataattgcgcgatacagctcaagattagacaccaaatcctcatggcattgccctcttcggcgcgctatgctgaattccgtcacttttatcgcagattcttatagaccgggaaacatgactaaaattgtttttgtcgaagacgacccagaagtcggaaagttgattgccgcctatttaggcaaacatgatattgacgttctgattgagccgcgaggcgacaccgcgcaggactttattaccgagcaacagccggatttagtgctgttggatattatgttgccgggtaaagacggtatgacgctttgccgggatctgcgtcctcattatgatggcccgatagtcctgctgacctcattggatagtgatatgaaccatatcctatcgctggaaatgggtgcgaatgattatattctgaaaactacgccacctgccgttttgctggcgcggctgcgtttacatttacgccaacggcaaagccagagcaaagagccacaggtagccacgctgaccaatcaaaacgcgattcgcttcggcctgctctgtatcgatccagttaatcgtcaggtcaatctgggtcaggaggaaattacgctttccacgtcagacttcgatttactttgggaactggccacccacgccggtattattatggatcgggaaatcttattaaaaagtctgcgcggcgtcagctatgacggaatggatcgcagtatcgacgtggcaatctctcgtttacgtcgcaaactttacgataatacgctggagccattccgcattaaaaccgtgcgtaataaaggttacctgtttgctcctaacgcctgggaatccgtccaacaatgagaaaactattcatacagtttttcttattgctgtttgtctgctttatggtgatggcgatgctggtcgggctggtttataaagtcaccgccgaacgcgctgggcgccagtctttagacgacttgatgaaaagctcgctgtcattgatgcgcagtgaactgagagaaatccccctgcgtgactggaataaaaccatcgaaacgctggatttgaatctttcgtttgaactgcatattgaaccgctggataaacgagatttagggccacgcctgaataaacgactgcgggcaggagagatcatcgctttagacgatgagtactcattcttgcagcgaattccgcgcagtcattatgtattggtggtcggaccggttccgtatttattctatttacatcaaatgcggctgttggatctggctctgctgattttaatcggtatgtcgctggcgttgccggttttcctgtggatgcgcccgcactggaaagatctgctacagctagaaaacgctgcccagcggctgggttccggacatttagatgaacggacgcactttgatccgacttccagtctgaatcgtctcggcgtcgcttttaatcagatggcggataacatcagcactctgattgccagtaaaaaactgctgattgacggcatagcccacgagttgcgcaccccgttggttcgtttgcgctaccgtttagccatgagtgaaaatctgagcgaaacagagcaactggcattaaaccgggatatcggtcagttggaatcattgatagacgaactattgacttatgctcgtctggatcgccctcaggtttctcttaatctggagccaatagatttaccgacctggctgcaaactaaagtcgaagatatgcgcctgattcaccgcgagcgagaaatcgcgctggatattccgcacagtggcgattttggtgcggtggatttacgcctaatggaacgagtgctggataatttggtgaataacgccctgtgctactccaatcagcgtttgcgcatcggcctgtggttcgacggcgatgaagcttgtctgcaggttgaagacgatggtcccggcattccgccggatgaacgcaccaaagtgtttgagccttttgtccgcttagatccaagtcgcgatcgcgcgaccggcggctgcggtttaggcctggcaatcgttcactccatcgcgcaggcttatcagggacgcgtttttgtagaaagcagttctttgggcggcgcgagcttccgtttctgctggccagtcaaagattactacagtttatccgtagattcagacgcagtatcagataaaaaataaatagcaaaaaaacgttgattatcatcggttaactaatggagtgccctatgatcacagcctatcatcagctgcgcagcaccttcactcgcctgtctcgttttgaacatctctcggctattgccggctgggacatgcaaaccatgatgccccctaaaggcaatttggctcgctcagaggccttggccgagctaaacgtgctgcatcaccaaattctgaccgcgccacaggtcggccaatggcttgagcaggcggaacaggaaactctgaacgatattgagaaagcgaatctgcgcgaaatgcgtcgccactacgataacgcggtactggtgccagaaagtttggttgaagcgaaatcgctggcaggcgcgcgttgtgaacatgcctggcgtcagcaacgcatcaataatgattgggcgggctttgcagaaaatctgcgagaagtggtgaaacttagtcgtcaggaggccgagatccgtgcgcaggctgccggcacatctcgctacgatgcgttattaaacctgtatgagccgggtttacgcagcagcgatttggatcgtatttttggtgatttaaagcaatggttaccagatttgctgcaaaaagcgatcgtcaagcaggctaaacaaccacatttaacaccagtcggcccatttgatttagagaaacagcgccagcttagcctgagtgtcatggcgctacttggttttgattttgacggtggccgggttgatgttagcgtacatcctttctgcggcggtgttccgcaagatgtacgtatcactacacgttataacgagaaagaattcactagcgccctgatggggatcgttcacgaaacggggcacgcccgctatgaacagaatttaccgcgcgaatggttaggccaacctatttctcatgctcgctccacggcgatacatgaatctcaaagcttgctatttgagatgcaattggcacgtagcgacgagtttctaaagcttttgctcccccttgctatcaagcactttggcgaacaagcggcgttaaccgaggacaactttattgcgcttaatcagcgtgttgaagccggttttattcgggtggatgccgatgaggttagctatccggctcatgtgattttgcgttacgaaatcgaaaaagcgctgatcgaaggcgaaattgaggttgaggacattccggcacagtggaatgaaaaaatgcagcgttatttggggctaaataccgagggcaactatcgcaacggctgcatgcaagatattcactggaccgacggggcttttggctatttcccaacttataccttgggcgcaatgtatgccgctcaattattccaaacggctcgtgaagcgattccaaatctggatcaacaaattggtaatggcgatctcagcgccttattcgcttggttgcagcaaaatatctggcagcacggtagccgttatctcaccgacgagttgataattaaagccacgggcgaaactcttaatccgcgtttcttccgtcagcacttagagcgccgttatctctaaatcttgcctcaggccgcctgaaaatggcggccatgctttgcccctggcattcataaattatttaataacaaccactcacactaatttttaatgctaatcgcacagccgaacgtctaatacaaacaagatttaaacaaaatcccgtttcccctgtgaaatcccctaaacccctaaattggatatttacacaccaagacagaacgccatattgagcagcttgggggctacctaactgccctgctactatctgcaggacttttaggcgttgttatattccccgattatttgttaatcgcaaaagcttcagatggcattatttgaactaaagcacgctgtatgttgtaactaaaatgagattcgaagtgatgaagttatgctttagcatcatcaactcttggctatgtgcagaaaatgcagaaaagtacgatgggtaagcttttactcttcagaggcgtaaattgcgtcgcttgatttgtcattatatttgatagagctgcttagttagactgataagagaggttccggggttagttcgaaatttaagcgggtaaaactatcagcccacaaattcctttgtttacctcagttaatgctcgatatttatttttcgatgccccctccccgcacctctttaaataagaatggccatccctgatagagataatcgagggatggccagagtcttagattagatttattacagtatccagtatggcatcaaactctgtttacaatgccaccccattaacactgaattccaggttggatgttggtttagcaatatcaatggacgatacctccacgccgccgacaaaaatagatgcttttatcggattcaaaccttcctctacgttaatgtggaatttgttcatacaggtggcatcaatgcggttagcagagagtttgaattgctgaacgaccccaccttcgaattgtacttcgagataacaaatattggctcggttaccgtcaccttgataaaccataccgaatgaaccatgtaatgccgggaagatataactgctcagcgccccctgaggatcgtaataaccaaccaatgtagtgaccgctaccccttgtttatatggacgtttggcttcgctcagcgagtaatcggcaacttccaaccaagttttaccattagataaataaacggtgttgtggttataggcaatggtatagagctggttattcacatgaagcaaagaagtagagttagttacgtttttaactcgtacggctttacctttattctcctctgtagcaataggaatataaatatccttagcaaaactcttatttttaaacgacacggtaatcagatcatggcgttcaagtaatgccgtcattgatgccatggtaacttctgaaggcgctgcatctttatttgacttggtttccacccggttttcccaaggttccattgtttgagtcgtggcattccacttattaaaaccggtaggcgaatggcgatcaaatacggctttattctccaggaaagtttgaatttttgataacgaataaggtgtatgcagggtaaaagcattactttgcatatacattggcgaaccactcgccatcgcatcgcgaccaaaactgtgcccggcaaaaggtgctgcgcattgctcatcctgacaggttggtttgttgctgattgtattttcgaagttagggatgaactgatcgttatcgctgtcccaaccccagcaggagtttggcttatccggagcctgatgaatagaacccgcgtatccgtttggataatgtcctaaaccgtagttatggccaacttcatggctgaactcattcccaatactgctttccagggtcacaataccgccgccgccggataaaccatgtacgataatcccattgacgtacttaccaatggaattatgcgcagtaagctgtgcggtactgtacggatggccgttttcccctttcccttgtgaggagttgataccgtagttagcattattaataccgatggaaatcagttctttaccaatgcgctgacgcattgttccctcataaacgccaccggtgcttggatcgtaatcggttagcagcacaccttccggcaacatcacttctttgaaatactgcggttcgtactgtgaaacgatcagtcggctcaatggaacctgttggaaatactggcgatgatattcattttttttctggaattcgaatgcgttgcgatacggcgttaacatacctaaatcaatggtgtggataattaactcgttcgacgccccaacctggatattaccaagttggccgtgtttgccgttatgttcaaaatcaagctgaatacctggaacgattttttcaaacggaataatgaccgaccagaagccttcaccaaaagaaatctggctatatttcacatcatccagactgtaccaagaacctttataattacgcagcactatggtcagaccacgattcagcgtaacttttttacctgagtagtggataaatgaattatatccggcattcgaggagaaagtgactaatttaccatccagttcatccgcaacaggcatataaaaatctttaatccaaccaccatctcgagtgctgatctttaaactgttattggtagaaagaatggatttaatctgattaccttgcgtatcattttgtagtttattcagctcggcctgaccagaaatggatttgtcataaactgccggttcaataaagtcatcttcactgccgttgaagtctttaatctgctcaaccagccgcgtcaagtccttgggcggacgcagggtgtaagtgccagccacctgattttccgcatctttcagagtcaaagtgaccggaatagcctcgtcaatctcttgttttgatttaaacaggaccatagttttcttatgcgatgttaaatgcggctgaatatcatcgttaagatgtttaccagccggaatcacactgttctgtacaaaaagaatagaggcagaaagctccccaccgagatcgcttggaaaatcgttgttattaaatgtaataacgttttttttgtcggtcgttgtcttttccatttttaataccttatttaattgatgttttttttcacagagtaatagtcttgggccaatatctacccttcccatccacagatattaacttgcgtattatcatctactgccagttaattccgcggcatcaagtaaattgcataacaccagatagaattagactgaactgattgctgcggcattccctagcagataaataaattaattttattattaattgtaaataataaactccttatcatttcgcttgggagttaacagcctactccaataaatccgataatatgatttaattgtctttctcagttaaaaaataactgagcgagtgtaacttacaaataaacattgagtgcagtcagaaattatcggggtaaataagaatatgacttctcaactccattaattttgatgggatgatttgcatacggctagaacaacaaaaattgttctctgaaaccaagcaaaaagactcacgtataattgggtgttggctggccggatgctctgataaatgtttatctcgtctttgataaaatttattatcactatcgcgctatttacgctaaagagattctaaaagataccgataagtcatagtgtagcttacatggcgtcgccttaggcgctcgttttttattcgacctgagcaggccttaagaatggaacaggtgttaccctcaacgatagaactaacgcccagatcggagaagatagtgccttattctgctcatgcgcaattatcaacgcgaaacagggatagcacagaaagtaacttgctgataacagaaaaaatcgacaacaaagattctggctatttgacgtggcagaaatcgatcggtgattcactgagtgacctttaccagttatctgatgctcagacaaaacaaattcaagaacaaaatgagcagcatagattgcgtattcacgcgctgtggcaagatatggaaagtcatatttttcaacataatagagaatacagccagcaattattgtcctatcaggataaagtgcaaaaatcgctaattgaatttgcccaacaaaaccagtgtgatgctcaaaattacaatacaaagatggctgaagcgttagaaatacgatttagtcggttaaaccgtcaattggaattaagtaatctggctttggataaacaaattagccaacagcatcgtattaccagaaaaatgacgctggcattaggcctgaatattctattttcatttatgttactgatgacatttttttatcaacatctcggctggttaaccatgcagtaattcaatattagaacagaaatggcccatataaatatgagccttttttatcaattttgtcttagcattaattccgcagttcgcgtaagtcaaaacgaacaggaatagtaatgctgatttcttttcgattagccattatttcctccggcgctggcggtaaaggttgcgcacgcttaggcagagccaaagcttcattatccaacgagtcaacgccgctgcttttcattaagcgagtcgctgaaaccagccctgctttatccagcgtaacgcgtaccagcacgataccctgccgactctggcgcaccgcaatgggcgggtaacgcttatggcggctaaggtgtcccagcattaggctactccagtcaggtatgccttgggtctgcgcaaaactgtcactggtgtaaggcgcggcgatacgttgctctgctgcgctcggaggcgcgctggttgcttcggctgacggcgtagtacttggtaacgagtccagtgagggcgcattatcgttttgcgtttcacgacgctgacttaccggtttcggtttttctatgaccttatttttcgctgccaatattgcgggcttcatcgcttccggcgctgccggctgcacgctttcctgccgttccgtttctgatttcacgctggattccggcgcagatagcactttgggcggccccatagggacatcatttggcgcggggacggattctattttgtctgccaataccagcatcaacgccggtggcggcgcggcggtaaccgaatccgcagcaacataatgataagccagccagcagatcaggccgccgtgtaacagtaaagccagaacggtgctaccactccaacgaacacgctcccggccacgcataggcatcatggcaatatctgacggcgccgacaggctatttttagtggtttgcattgttttcctgcttgggtaagaaaggataacgaggtaactacaaagaaggtcacttgagttggctatttgggcagtaaaaaaataaaaacagtataaacattggtagattagttattcgtcagcataattcatcgaatatctatctgaacccaataacgagagaaatatttgacctgaactggcaagacatcgggtaacgctttaagaatgcggtcagtatccgccaaagggaaaacccccgacaaacgcagactggaggcttccggctgacaacgcactacgccggaacgatagcggcttagttcggcaagaaaatcactgagtttctgattgtcgactaataattgcccctttacccaagcgcttttttctcgtattaacggcttcaccccgcatccagatgcggacagccaaccaccctgcccagccgggatagtcaggctctgcctaagagaccgcggtgataaccttaccgccccctgataaacatccacctcactctgcgttccctttaagtaaacgctaaatcgtgttcctatcgccacaatacggccctgtggcgtttccaggctcagcggacggggaaaatgcgcctgctgttccaactggccactttccaccatcacttccccccgaattagcacaatctggcgagccacatcgctgtaacgcacattaaccgccgtttgagtattgagctgtaggtgcgtgccatcttctagcgtcagacttttttgttcgccaatatcggtgtgatagtcagcctgccaagatagccagcccctagagtgaccacccagaatcacccctccgccggtgatacagctggcggccagtaacttcaatacgccccgccgattggttttccccaatttggttttccccaatatagataaagtgctgtgggctgcctgaacgttgaggcgactaaaatcggcgcaacaagactcaatatgccgccacgcccgctcattatccggatgctgattacgccaatgtaaccacgcctgccgatcctgttccgtcgccgcatcgtccattaaatgcgtcagccagaaaaccgcctcccgcgcgctttcgctggcaataggcacgccttgggcatcctgaatcgtcggattattcattgggggcatggtcatttcagcagctattcatatagggagatgtttacttaagacggcagtcatctaagaagatagcgcgaaaaaacactgaagattagcgcgctgtaggtactgtttaaccgaactggcagaaacccgcagacgttcagcaatatcgctgtagcgcataccctgtaagtgagccaacaggaaggcttccctcacctgcggcggtaaaccatcgagcgcggcatccagtttttccagaatttccaaggttaatagacgagtttcaggcgatggcgtaaccacttcgggtaatgcactgagagccgagagataagcatcttcaatcgttttgcgacgatagtgattagccaccagacgccgcgccacggtggctaaaaagggacggggctgacgaattgcctgcgcatcgggattaatcaggatattcaggaaggtatcttgcgtgagatctgccgcatgttgcggacatcccactttgttgcgcaaccagtgataaagccaaccgtgatgttcgaagtaaagtcgctgggcaaaaccatgcgcactggctgatgtctccctcatcgtcaattttaaccccgaaaattacagctcacttgaatgataatgattattatttatattttcattattctatgtcaagttattactcgcagtgagtcttatttttatagcaaaccgcttatttctcccttttggtttcccgtcgtagtccctgtctatatggcaaaaaaacggcatccgccaaggatgccgctgtttgagctagcgttggtcttagaatcgttgagaaacgctcagctttatattacgaccaacgccagagaccgactcgccaaggtacgggtaatactcagtgttaaacagattatcaaccgccacccgtgcttcaaatccatccagcgaagctggctgccagctggcaaacaaaccgtgcaatacgtaacctttggttttcggtaatgaccagatatccgctttaggatcgccatctgacggagaacggtcctgcttccgcacgaaatcccctttccagccgaatgccatgtcccattcaggcattttaacccctagcatggcatgtgccgcagtcggtggaatttctgcaatccaggtgcggttgccccaagggtcgcgcggcgaagcatctctttccccacgaatggtggaataagacaagttgccgaaaattcgctcactatcatagaaggtttcaatttctaacccttcgatggtatagcccggtaaattgcggtaattggaaagtgtcccactacaggaagacgaactaccgctgacagattgggcgtcacacagcacgccgcggcgatagaagatttcgtttttaccccggttacggaacaaggtagttcgaatttgcagactgtcctgtttcgtcatcagatcgttaaaatcgaggattgcgcccatgcgaatcccggtgatggtctccacatccagattgcgactggtgcccggtatgctggacgccccagactgcacctcgtactgctcatccaccaccggcgcgcgccaggtgcggctgatgtcagagaacaatgacagattctgcgttgccttccacatcacccccaaatgcggagaccagccggtgtaagtcacacgactgtagtcgtgaccggccgctggatcgcggtcattaaaacgcggagcgaagttcggctgcccggtattggtcacgtgatcgtatcgcacacccggcgtgacggtcaggctccccaacgtcagcgcatcttgcagatagaggctgcgggtttcctgctctcccgctggcatataataaggctggaaatagccatagttatagctcgggttatttttttgagctggatagtacatcaaggtgtcgcgttcgtgtttatgccagcgcgtccccaccgtcaacacatgttccagcacaccagtgctaaagctgctttcattgttgatatccaacatgttgtctttataactgacccagctttcattacccaaactgccgaggaaactggtagatgccgttttcggccgctgatcgtattgtttggtgctggaattggcataagtcacggtcatattcagtaacgggttatcttccggagaaatattccattttaccgagtagttgctgtccacctgatcccgtaacaccagcttacgtcgccaggcttcttcatagccatatttcttgatatctgcggctgatggggacggcatatcgtcacgtttggcggcaaaaggctgccagccatcggattccgaacgcatcgccgataaggttagagtctgagaatctgtcagataaatattggtcttgagtaaataagaggcctgatcgttagtggagtaggcaaatcgcgtgccgtccgggcggcggatattatctccgtcacgtttactcatatagattaagccgtcggccagcccgttttccgtgcgaccgtataaagcagaactatagatattctgtctatcattagtgtggtaactgtatttcagcaggccaccgaagttttcacccggtttaagcatatcaccggcgtctttggtttcgattttcaccgtcccgccaaagcccccgttaccattcagcagattgtgagggcctttatccacatcaatacgcttaatcagctccggctcaataaataccgaaccctgtcgatatttttcgaatccttttggcgcaccatcgagggtgatttttacatcttccatgtcgcccatgccccagatattcaggctttgcccgccgggacgtggcgatccagccatagaaacaccgggtaaacggtcaattaaactggccagattatccgcctgcgctcgggcgatatcttcctgacgcaaggtggaacgccctgcctgtaagctgtttgccattccaccaatcaccgacagctccggcatggtaatgctgtcatcggaaagccacgcctgcggaacttccatcaaccggtaaccattcggcgttttgaccgcctgtagcccgcttcccgccaagagttgtgcaaacgcctccgacaaactttgcgcgttattcacgctagcagcggttttgttctgagtctgctcggcggtgaaagtcagaataatgttagccttgctagctaaggtctgtaaggccgcggtcaacgatcctcccggaatgctgtactgcgtcgtccccgcgctaacatgctgatccgatattttttcctgagccatcagttgacccggcagactaatacctaacgacagtagaccggataaagcgtagctgacagggcgagcggcgcgatgagatgatagttgctggtgaataaaatgcgctttcttaactgccatggaaatatgctgtgatttcccgctattttttatagtcataacgttccctgagtgcattgatatgaaaactcatcagagaggtcacgcgagaataaaaatcgggcagaaaaaaaacataattgtatatatcgtcgtttagcctgagcaatcgcccccacgcaggcgactggttttcaagtataaacagccgctgtacaaacggttacacgccgaaaccaatgactcacggatcttcccatcagcattccctacactctttttaacggcccaatcgagccgcccctaaacagaatgccgaggaaacacccatgaaaaaattattagccttagttgttgctgctactctgggcttgtcttctgcggctttcgccgctgacaccactgccgctgcaccagcaaccgctgccactcataacaccacggtaaaaatggctcatgaaaaacacgccaaaaaagccgtgaagaaaaccgagcaaaaagcacaggctgctaaaaaacaccataaagccgtaaccaaagcgccagcgcagaaagcgcaggccgccaaaaaacaccacaaaaccgtaaccaaagcgccagcgcagaaagcgcaggccgccaaaaaacatcataaaagcacggtaaaagcggcaccagcggctaaataactgaccgaatgtaacgaagtcacacctgactcgctcaacacccggttataccgggtgttttttatcgggggtcgtcaccatgctgcgtcgctacctattcgaaatcatcctgaccgctctgattctgtgcggtctgattacccttagtttttacttataattctaattaagccatcacacgaaaatatcgaaaaatcaattgctgaacagcccgacagggtgaattatgtctatagttaccggtagcaatattcctaattttgccggaatcagcggtttttttgagtgttaatggatgacctttgcaaggcagattatttatgcgcttatcatcactactactgttgagtctgttacctttttccgtctccatggcctacgccgactccccagaaacggccagcgccaaagatcaaaacacgttattcttcggaaaagacgatcgaacagaggtgaccaacggcgcggattggccgtggcaggcaattggacaaattgaaacggcgagcggcaacttatgtaccgcaacgcttatttcccctcacctggttctgaccgcaggccattgcgtactggctcctccaggaaaaatggataaagctattgctttacgttttatttcccacaatcagaaatgggcatatcaaaccgggaagctggaaaccttagttgaccctaaactgggcaagcgcttgaaaccggacggtgaaggctggatcgttccacctgctgcggcggcctatgattttgctcttattcggttaaccagttcaaaatccttacccattaaacccttacctctttggcaaggcacatcagcagagctaacgcaggcactcaaacaggctaagcgacaggtaactcaggcgggttatccgctggatcatctggatagtctgtacagtcatgaaaactgtctgattactggctgggcacagcaaggcgtcctatcccatcagtgtgatactttgcccggcgacagtggttccccgcttttactcaaaggcccggaaggctggtcgctgattgcaatccaaagctcggcccctgcggctaaagaccgttatctggcggataatcgcgcgctggccgttacggctatcagagaaaagctaaatctgctgagcaaaaagtctaaagataagtaaatattcttcgctgaattgacgagtgaatagccggcgtgctcatcagagcacgccttcttccttccttctcctgctagtcctgggcttcatttaaatagcaaaaataaagtcatcaaccttgctttggattttctcttttactctctggctaatggcggcgtagcttctttcatgcagtgttgctgtcgtcatataaacatgaatatcgccaacaatcccctgcgtagaaaatttctggctaagtaaatggcctttcactgtctcggcggtggtgaaaaacaggcaaagcgtggaaataacattcagatccgacacaaaattcacctgtagcttcactcgggtgacagtgccggaaaaaggttcacgtataaaatcatcggaatctgtttcagcgaaagttccagcgtgataaacctcgattgcctcctcagtgaatggcttctcaagtaataattccattccactggcgacgaaacgccaggcatctggcggcaccatctctttaaaaaaaatcgctcatcatgtctttgagcactagttctgcgccgatcttatcgggtcgatatctatcagattgtacgtcagagaactgccagaagatcgattccaatatttgcacatagttcacaaaccaacttttggatgacaagaatcgcgatgttttttcatctgcgtttaattgcgctaagaagtaggagtaaagcgagttttgtcggaataaattattcgtttcaggatgaaagacaaataaactgccgtaatccacatacacgtccgattgatagaaactcatacacacctcgcttggcatgaattgaatagcattacaggggtgttctgacggtcactcatctataaacatagatgaaaagcgttattaatataaaaaaatttttatattaatattcattgtccgaatcaacttccaacaaacgctgaccttcgaataaatatctttacagccctcacaaagcgggcgcaaccaattataattaaaggaaaatttaaataaaaaccatgagcaaaatcaattatcgcaaagaatgcaccagcctataataagaataacattcaaataattattgatattaaaattaatgaacttataattcattcactatcttactccacagtaactattaaattaaaacttagagcaacaattaatatttatagttaaatattatttattaataatagttttcataaagaatctcattaatatacgtttaattatattgataaaagcaaagtaatagattctgtatctttcctcaccgttgtttctgagtctaacgagataccaccgcgcgatcgccgcgtacaacggcggactgcacggtgatagccgatcaagactgggcggaaagttgctcgatagtttgcaggatacgtttatccgaaaccggataagcggtacccaattgttgagcaaacagactcacccgcaactcctcgatcatccaacgcacttccttcacatcatcatcctgcgcacgtttcggcggcagtttatgtagccactgctgccaaacctgctgcacctgctcaacccgctgcatttgagcgcgatcgcgatgaggatccaccgccagtttttccaaccttcgctcaatcgcatgcaggtaacgcagcgtatctggcaggcgtttccagccgttgtttgtgacaaaacctcgataaatcaggccggaaagctgcgttttaatatcagaaagcgccaacgcctgcgcgatatcaacacgccctttcaaacgtttgttgatactgaataccgtcgtcaggatttgctctacctgcttggcaatctcaaccacggtatcattcagttccgcccgaacactctcctgtaagcggctaaactcctccgctttccataccggcccgccgtactgagccaccagtttgtctacgccgcaggcaatacaatcgtcaataagatccagtacgttgccataactgttgaaatacagccctaatttggatttattcggcagtttttcatgtaagtacttaattggcgacggaatatttagcaaaagaagacgccgtgtgccctgccacatggcttgctgttgctgagtttcagtttcaaataaacgaatggctacgctgtctttttcatccactaacgccggataagccttcacttcataaccaccgcgacgctgttcatagcaggttggcaaatcgccaaagctccagatatgcagatcgttttgctccaaaccatcgtcagccacggcggacaaggtttcctgcactttttcctgcaactggattttaagcgcagccagatccttaccttctcgcagcgggcgatttttatcgtcaacaatacggaaagtcatgcgtaaatggtcaggcacctgatcccactgccagctctcacgtgacaccgtcacgccagtcatgcgccgcaactcccgctccagcgaatccaaaagcccggtttccagtggcgtggcgcgagccagaaaggcctctgcgtaattaggagcaggaacaaaattccgtcgcaccggtttcggcagggatttaatcagcgcgataaccaattcccgacgtatccccggaatttgccagtcgaagccttgctcttgaatctgattcagaatgggcaaaggaatatgtaccgtcaccccatcggcatcagcgcccggctcaaactggtaggaaatacgaagctttaggctaccctgataccaaaaattaggataatccaatggattaactttgttggcaccatccttaatcagcatggttttttcgaagttcagcagctcaggctgtgcctgactcgctttcttccaccagctatcaaaatggcgcgctgagaccacatcacgaccgatacgctgatcgtaaaagttaaacagtgtgtcatcgtccaccagaatatcccggcgacgggacttgtgttctaactcttccacttcggccaacagtttcagattttcacggaaaaaagcgtggcgcgtctgccaatcaccttccaccagaccgtggcggataaacagttcacggcacagcggtggatcgattaagccatagttaatcttacgcgccgcgacaatcggcagaccaaacagcgtcactttctcactggccatcaccgcaccctgagctttctcccagtgtggttcgctatagtgatgtttgaccagatgctgtgccagcggctcaatccattccggttcgatgcgtgcggcaattcgcccccacaggcgactggtttccaccagctccgcgaccatgacccatttcggcggtttcttgaataaacccgagcctgggaagatagcaaaacgggcgttgcgagcgccggtatactcttgtttatcagcatctttctgcccgacatgggaaagcaatcccgtcaacaatgcagtatgtacgctgcgataatccgaaggctcactattcaccggcagccccaactctctcacgacctgacgcagctgggtataaatatcctgccattcccgaacccgcagataattcaaataatcgctgcggcaaagtttacggaactgcgccgatgacaactctttctgctgttccttgaggtaatcccaaagattaacaaaggccagaaaatctgattctttatctgcaaaacggcgatgtttctcatctgacgcttgctgcttatccatcggccgctcacgcggatcttgaattgacagcgcggcggtaataatcatgacttcgcgcacacagccgtttttctgggcttgtaataccatgcgagctaagcgcggatctactggtaactgagccaattggcggcccaaaggcgtaagttgctgatgcccgttatttgcagtttggatcgcccctaactcttccagcaagcgtacgccgtcctgaatgttgcgtttatccggcgcttcgacgaatgggaatgcggcgatatcccccagccctagggaggtcatttgcagaataactgacgccagattggtgcgcagaatctccggatcggtaaattcgggacgagacaggaaatcctgctccgaatacaagcgaatacaaataccgtcggacacccgtccacagcgccctttacgttgattagccgaggcttgagaaatcggctcaattggcaagcgctgcactttggtacggaaactgtagcggctgatccgggcagttccgggatcgataacgtatttaatccccggcaccgtcaatgaagtttccgcgacgttggtagccagcacaatgcgccgcccgtggtgggattggaataccctattctgttcactgttggacaaacgcgcatacagcggcagcacttcggtatgaggcagattcagcttagtgagcgcgtcggcggtatcacgaatttcccgttccccgctcataaagatcagaatatcgcctgggctctctcgacccagttcgtccaccgcatcaaaaatagcctgtagctgatcccgctccacgtcatcggcatcatccaccacggggcgatatcgcacttccaccggataagtacggccggaaacctcgataataggtgcgttgttgaaatgacgagagaaacgctgcggatcgatagtcgcagaggtaatgataaccttaagttcaggacgtttcggtaagagttcacgcagataacccagaataaaatcaatgttcagactgcgttcatgcgcttcatcaataatcagcgtgtcatactgcattaacagtcgatcttgctgaatttcagccagcaagatgccgtcggtcatcagtttaaccagggtattctcacccacttgatcgttaaacctaaccttataaccgacgcaaccgccgagagtagaatccagttcatcggcaatacggttcgccacggtgcgagcagccaaacgcctcggctgagtatgaccaatcacgcctttcacaccgcgtcccagttccagacagattttaggaatctgcgtggttttacccgaaccggtttcccctgccacgatcaccacttgatgatcgcgaatagcattataaatatctgcctttttctggcttaccggcaggttttccgggtaattaatcgtcggacacgcggctctacggctggcaacccgctgcgcggcaacggcaatgtcattctcgagtttatcgagaatcggttgcaggtcctgcgggttagtgattttgcgtgcgccttgcagacgacgacgcagccgttgctggtcgcggagcatcaactcgccaagctgggcggataatgcggcgagagaagatttcacgttcggtattccttgttacatcggccttggctctgggcggaggcatgattttcttagactatattgcgagacatggtaacacaatccgcttttccgccctatattccgcgggttgtagccttccgcaaattttattcaataaaatcgaacaaagaacgcaaaatattgcgctatccctactagaaaaatatgaatacagtgtattccattgaaagggtatcccccttatatcactgttacctattaaggaattcccatgagtaaagttctggttcttaaatcaagcattctggcaacgcactcacagtccaaccaactggccgatttttttgttgaagaatggaaatctgctcacgccggcgaccaaattaccgtgcgcgatctggcagctcagccgattcctgttttagacggtgaactggttggcgcacttcgtccttctgatgcaggtctgactccgcgtcagcaagaagctctggctctttccgacgagctgatcgccgagttacaaggccatgacgtgatcgttattgccgctccaatgtacaacttcaacattcctactcagttgaagaactatttcgatctgattgcccgcgctggcgtgacattccgttataccgaaaaaggccctgaaggcctggtcacgggcaaacgtgccattatcctgaccagccgcggcggtattcataaagataccccaaccgatcttattgttccttacctgcgtctgttcctgggtttcatcggtattaccgatgtggaattcgtattcgccgaaggtatcgcttacgggcctgaaatcgcaaccaaagcacagacagcagccaaagaaatgttagttcaggtagttacggcttaattccgccctatagaggcagaattttgctaggccctcgtcatacccattagtgttatatgtcattgcgcaccgtcgggtgcgcttttttagctctggcagtctacgggcgtaatgtttccctcattgagtccgtgtctaacaacatcatcgtacttttactttattcatcagtcgccagcccattaacccattgcccttttagcgctgcttttattgcctgatgtttttcgtgtcccccggcaatagcaataaccgttttttgcggcttgacgtgcaaagtgacgctggtcaggtaattaccttctcaacgctgcatccactggccgttaattccccgcacaaattcccccggctgagcacgactcaccaacttttgccctgcaagtttggccacttcatcggttgttacgtggttatttttggccacttcctgatacttttcttctctcgccgcattaatctgcgccaccagcgccagcgtttcggcatctttctttaccggtgccaggtagccactaagcgtttcccccactcgtccctgctgcttggcctgatctaatgtcagcgcccaagcgccagggctaaacaataaactgcttaataccagactaaggccaacccaccatttcgtttgctttttcatgttggctcctagaacagttcagattgatttttcaataaattctctacgtctttatcgactttgatgcgaatttcatgctctatctttacgttcatattgatggtaatcggtttctctggcgtcgcaacctccagccgcacacaaccactgagtagcagcgtgcctaagacgatgattaccccatactgctttgccaacatcttcatttggttttcctcgtcgatatgcccgaccgccgcataacgctgtaattaatcaccctatctgaaaagagccctccgtgaatggaaaacctccctacacactgatagcacctgccataagctactgaattgattataaccgtaaccaagacggtttctaccgctaaccgcggctaagcaccgacaaccgaacaaatttgcgcagcgctacgcataatttacggcaaaatcttccccaacgcataaatagctttatgctgtcgccatcaaggtagaatttacgcaataccaaccacataatttgaatatggagcaatcaacatggaacctcgcatcgccacgctttccgcccccatcaccgtatctggcctacgcattcgtacccagaataacgatgaatttaatcaaaaaaccgccaaaatcaccggtctgtggtctgagtttttttccaaaaatctggcggaatgcacgccaaacaagctcgataactcaccgatttatggcatttatactgcctatgatggcggagtaaccggttattttgacgtaatggctggcgtcgcagtgaaagaaaaaacagaggacgcagactcaattgagattcaagccgggtcttatctggtttttgaggctaatgggccaatgccagcggccattattcaggcgtggggcgatgtctgggcttattttgaacagcaccctgaggtaaaacgacgttttgctaccgactatgaaacatatatcgacgcagaaagcgcgcaaatttatatcggtatactgccctagtctgtgggggaaaggaaagcccattgcaagtggctgaaacttgtaaattatgttaaatatcaaacatctaatagagttaatacattttttagcgacgagtgactaatgagcttccctgtgatttcaagcctaagcaggcgcaggcaaacacgatgcggttagcgctttcaccctagttttaacggatgcacactattttgtggcaaccttatcatctgaatctgacgccgcagcaacaggtgccgtcggcatagaaagcgtctgctccaaccattcctgcaggttgtcgccaaaacgcagactgcgccacagttgaaatacgttttcctgatgggtgtaattcaacacaatcgcacgcttcgcgtttttctgagtattgacgccgtgaattttagattgcaacgtcaactcacccagattattcagactcaccttggcataggagtgagaaatctccagatagcgcagccagtcaatcacggcaccggtggcaacgttgctttcgccaatagaatccgccagatccttttccaaacgcagagtcagtaatcctgcgttggcaatccagccgtcgcgtaccagccactgcggatcgtttagaaagagcggcaactcgccgtcgaccttgccagacatagcaaattgcttgggcttcaaaacggtaaacaaagcgcttaaatcgacctgttttaatttcagcaccgccgcatcgtgctgtggtaaacgcaatgccgacaggcttaaatgtccatccagaatatccattcccacgttactgagggttaatggttttttctcggtgtacggataagtgccctgcagatcggccgtaatattttgcatttcaaacaaattggttaaggcggcaattcgcagagtcaccggttctttagctccaagctgccactgatggtctttcaggcgataagacatcacaaaatccagaccgctcatttcgccgtccttgagccacataccgccctgtttgaccacccagtgtccaccggcggtaaaaccttgctcacgcgcggcagaaaatgcggcttgcgcataaaactcgccgtcacgcaatttgataccgagattaggggatagcaagggctgaaatacctgcaaagattgtttcggccaccaggcttcccctctcaaacgctctccgtcccaacgccctcgcaaagggattggcccaatttgctgtgccgctaaatccccctgaaactggaaatcatccggattagtgcccttaaggcgcaaattcatcaccgttgcaggaagatagcctccatcgctcaacgccacgcgtttggccgttaactgcatattgccgttgaacgccgcttgttcgccattgcgctgccacatcagcggttccgttaacgtcagtctcggtgagaatacattgaccatcccatactttatctgatcaaaaccggtagaaagctgatccaaatgaattaaagaatcttgccaacgccctttcccggcaatatcccagcgagcagccaggggaggtaaatcgcctttgccccaatagcgccattgccagataccgctatctggcaaaaagttttgcgcgctgccatccagatgcagttttacattaccccagtagcgatcccgtgcattcactatcgcctgcaaacggccgttaatcccggcggcagtcattcgtactcccgccaacggccagcgagcatcattcaagcgtaattctggcgtaatatcaccgtaagcacggagcaacgcaccgggagacaataacagcgtcgggttgagcaccgaaccgctcaatattcccggcaaagtgccattcaatatcagattggacaaattagcctgaccgctaatctggaaacgcagatcgctgtcgatcaaacttaaatgacctgggcctaatgtcagaaccgcgttgcccttgccattttgaccggaggtaattacgttgattcgagcagtaatcaccgcctgatcaaacccttcactccaatcctgtaccgtcagatttacgccgccgctcaacggctgctgagcataaggccactgccaaacgccttgattaatttggatatgtctggcggcaacctgccagggcagcgtaatcagcgctttatctccgcctcgctccgtcagggtcaactctccctgttgctgttgccaatgtaaagccaccagcaagggctgttccatataaggcgttgtgaattcgccggccagttgccctcttgtcggcaacgcgtccaatgacaagggaatacttaatgttccgcttaaccgaagcggttgaacgcttccgggaatagccaaaacaaactgctgtaaatgcagttgttgctgattatccaaagtggcgttaaaacgcaatttatcaccttggtaatcaataacctgaccagcttttgccgtagtgaatgacaacgcgccgccatactgttgccaaggggtgacagaaagattatcaatatgcaggtcgagagaagaaaggcgacgttgccagtcggccagattttgcgacgttgactctgggtcgtccgacgtcaactgactcaagcactcggtatccattgccaatgttttagtctgaattccccaacgcccttctttataagaaagtcgggtatcaccaagatcgactaacggacaggtttttgccagaaaacgcagaccatccacatgtaaggctccgtcacgccaaaccggcgtatgggctaaaatgagttggctaccggctggcaaccaatgggctgcaactttcggtaaccattgaggcaaagttttccataacgcgacgactagaatcacgctggcgaacagtagccaaccgattatttttaggcttttaatcattattggccttgttttatgaactgtgtttcctaaaccgctgcacttagcataacaaatttctgactgctgttattatgtagcataactaaatccctaagtaatatagataatacatcgggagcgccatcactcccttactctaacaaattgtatgatttattaaattctgatactttgatcacaatattttggcggagaaatcatgatgaaattagccatttacagtaccaagcagtatgaccgtaaatatcttgagttggtaaaccagaagtttggctttgaactggagtttttcgattttctgcttagcccgaaaacggcaaaaactgccgtaggctgtcaggcagtttgtctcttcgtcaacgatgacggtagccgtgaagtattaactgaattagccgatatgggcgtgaaaatactggcgctgcgttgcgctggtttcaataacgttgatttagatgcagccaaagagctgggcattaaagtggttcgcgtaccagcctattctccagaggcagtagcggagcatacagtaggcatgatgatgagcctgaatcgccgtattcaccgtgcttatcagcgtacccgcgatgccaacttctctctggaaggtttaatcggttttaatatgcatggccgtaccgccggggtgattggtaccggcaaaatcggcgtagccacaatgcgtattctgaaaggtttcggcatgaatctgctggcctacgatccttaccctagtgatcaggccttggagttaggtgcagaatatgttgatttgaaaacgttgtatgcaaaatctgacgttatttctctgcactgcccgctaacgccagaaaaccatcatctgttaaataaagatgcctttgatcagatgaaaaatggcgtcatgatcatcaataccagccgcggtgctttgattgactctacggcggctattgaagcgctgaagcagcagaaaatcggctctcttggtatggatgtgtatgaaaatgaacgagatttgttctttgaagataaatccaacgacgtgattcaggacgacgtattccgccgtctgtcttcatgtcataacgtactcttcaccggccatcaggcgttcctgaccgaagaggcgttaaccagcatttccgaaactaccatgcaaaatattcagcaactcgaccagggtttaccttgccctaacctattgaacgcataataggttgaatgccatttcgttatttatacagggtgtgttctgcgcaccctgttttatttccagttacctttgtttattgcccctgaactactcgccctcgtcgaatataagtatttccctctgctttgtgctcttgccaacggtgaaataactcaaaaaacattccccttgaccgattaagaatggctgcaattctgataagaaaactcttgttatccctcacttttatcatatagcgcggttaacaaacccagggtttggtatcatatacttaaattaatcaaggtattcgtctgtacggacgacgcaattacctcatcaggagagaacatgaaaaaaattattccattggctatcgcgggaattctattagcgggttgcggtatgaatcagagccaaaatacggctaatcaaattaccgctggggatttacagcatcataatttcgtgttggtgagcgtcgacggtcaatcgccaaaaaatcagcaaggcaatatgccgagcattgagttcggtgaaaaaatgcacatttctggcgcaatgtgtaatcgttttatgggacaaggtgagttgaaagacagcgttcttactgttaaggctttggctggcacgcgcatgatgtgcaacgatcctcagttaaaccaatgggataccttgattggcgaggttctggctagcggtgccaaagtgaccttgaataaaggcgagttaaccctgaataacggcagccacaccttggtttataccagccgcgactgggtaagctaagcctgtattgtgcctcaggtagactatggcaatcgaatttcactgccatagtcttaataacctgtaacttcagaaccgttttattagctcgccggacaggctccgcgcatcaacgcccactcttcgcagcgctttccgtcaggtaactggcacattccgatacttccaccatttagctgtttggctagcgttaatactccccccgcattagcgcagttaaccgatgccggattagacatattgacgtggtggacgctggcgctggttgcctgctgttcaggaatataatcgtcatttgagttgctgctacaggcggctaaaaataatacggcgccggcgaccaaacaagatgatgctttcattgttacgctccagagcataaacagactgtcgaaattacagaagataagcgcccgatatcatatctgagccgttccatcagcgtcgagtgactttatcaatatttgttataatttgaactcagtatatacggtacatatcagaacaattaaatgtagttgttatttacataaccagcttggaaaataaacgcggcctattgagataattattatcgtgtttgacatgcgtagtctcatcgcacaaaaaatataacgggaaaaatcatgattacagacttattgctacgaatagccttggcgggcgcactaggtggattaattggcatcgagcgtcaattacgttctaaagaagcaggcttgcgtactcatattctggtgggcattggtagcgccatgtttatgatcgtttctaaatacggttttgatgatttgctggctctggggcacgtcagctttgaccctagccgcgtggcggcacaggtggttagtggcatgggcttcctcggcgccggtacaattatgattcagaaacagatggtaaaagggctcaccaccgccgccggtatgtgggtgacggccgctattggcctggtcattgggagtggattatacgaaatcggtatttacggcacgttgatgacgctggtggttctggaagtgttccgtcaattgagcaaccgtttgatgggacatcatcattatgtgctgatacggttactgcctgaatcggtgccgacggtcttagtttctttgcagaaaatgcgtattcgccctattaatctttccgtcactcagcgagatagaaacagcgaaaatgcagactgtgaattaaccatggaagtgacattgtcaccaaaaagaagtgccgacaaaatatatcagcaattgctgactatcgagggtgtccatacgctagatattcgttgatgccctttcccccgtacggtatttcctttgttcaataaataaaggaagtaaaactgtgcgggggaatcaaaacaattaatgcattgtggttttagacagcaaattaatcaccaacactccggaaataatcaacgtcatccccaaaatcgccgcccaatccagcttttgctgatacataaaagtcgcggcaaccgagaccagaacaatccccaacccagaccagatagcataggcgatgcctaatggcatagttttaacgacctgagaaagtccccaaaaagcaataccatagccaataacgacaaaaatagacggcaccaaacgagtaaaaccttctgaagcctttaataaagtagttgcgataacttccgccacaatggccatcatcaaatacaaaaatccagtcataatctttttctcatttcaatatcagcatttgagagtaaagtatgccattctcaaatcaatgccggttaaatacacagtggaattaaccgtaattttacatgtattggccacgtcaggttgatttttctgcgacattcacatggctgtaataaatagttttctaattgtaataattattttctgcgataacttaatcccgagcctcccccacagaaatatgcctgtcagcgtcattctattatttttttcctttttttacctacacacaaacacgataagaggcaaaaaatctctctgctagactttccttataacagaagtcagggacagacagttatctccccggtctcagcatgacgagcaatgtaaaggtacaattaatgatcacaactgacggtaacagtgccgtagcctcagtggcttaccgcgccagtgaagttattgctatttatcctatcacgccaagctccacaatggctgaacaggcagacgcctggtctggcgatggtaaagttaatatctggggcgatatacccagagtcgttgaaatgcagtcggaaggcggggccattgccacggttcacggcgcattacaaaccggagcgctgtccacctcattcacctcatcccagggtttactgttaatgattccgaccctgtataagttggccggtgaattaactccattcgttttacacgttgccgctcgcaccgttgcaacccatgcgctgtcaatttttggcgatcattctgacgttatggccgttcgccagaccggttgcgcgatgctgtgcgccagtaacgtgcaggaagcacaagattttgcactgatttctcaaatggcgactctgaatagtcgcattccatttattcatttctttgatggtttccgtacctcccacgaaatcaacaaaattgtttctctcagtgacgatactttacgccaactattgccgcaaaaaggcatagatgagcaccgcagccgggcgctatcaccggatcatcctgtcgtgcgtggcacctccgctaatccggatacctatttccagtcacgagaagccaccaacccttggtacaacgcaacctatcaacatgttgccgaagctatggaagcttttgccgccgcaaccggtcgggaatataaaccatttgaatactacggccacccgcaggcggatcgcgttatcattctaatgggttcagccagtggtacctgcgaggaagtcatagacacgctgttgacgcgcggagagaaagtcggcgttctgaaagttagattattccgccctttctctgcctcacatttactgaatgtgctgcctggctcagccagtaaaatagccgttctggatcgaactaaagaacctggcgcattagccgaaccactgtatctggatgttatgaccgcgttggcggaggcctacagtcgcggtgaacgcccgactttacccaaagttattggcggacgttatggcctatcttcaaaagaattcggccccgattgcgcgttagctattttcaaggaattagcgctggatatgccgcgcccccgctttaccgtgggtatttttgacgatgtgaccggcctgtctctaccattaaccacggaaaccattccccagcgcgccacgcttgaagcgttgttctacggtttgggcagtgacggttcggtttccgccacgaaaaataacatcaaaatcattggcaatagcacttctatgtacgctcagggctattttgtctatgactccaaaaaagcaggcggtctgacggtttcccacctgcgcgttagccccacacccatcaattcagcctatctggtcagccaagcggactttgtcggctgccaccagctccagtttatcgatctctatcaaatggccgagcgcttgaagccgggaggtattttcctgttgaataccccgtttagcgccgacgatatgtggcagcgcttgccgcaggaagttcaggccgtgctgcaccagcgcaacgctcgtttttacgtgattaatgcagcgaaaattgcccgcgaatgcaaattgggcgcgcgcatcaataccgtgatgcaaatggcctttttccatttaacccagatcctgccaaccgatatggcgatgcagcaattacgggatgccattgagcgcagttatagtagcaaaggaactgaaatcgttgaacgcaactggcaggcgctggatgccaccctcgatgcgttaatagaaatcccactggaacctatcgattccagtagcccaatgcgcccaccgattgtctccgatcaggcacctgacttcgttaaaactgtcactgccaccatgctggctggtttaggcgatgccctacctgtttctgcctttccgccggatggcacctggcctgtaggtaccacccaatgggaaaaacgcaatattgcggaaaacattcctctctggcggcccgatctctgtacccagtgtaaccactgtgtggcagcctgccctcattcggctatccgagctaaagtggttcagcctgaggcgatggccggagcaccagacagtctgcaatcccttgatgtaaaagctcgggatatgcgtggtcaaaaatatgtactgcaagtcgccccggaagactgtaccggctgtaatttatgttatgaggtttgccccgccaaagatcgccagaatcctgaggttaaagcgatcaatatggagccacgtctagctcatctggccgaagaaaaatcgcactatgattttttcctcaatctgccagagatcgataaaactcaaatggaacgtatagatatccgcacttcacagttgatttctccgctgtttgagtactccggagcctgttctggctgcggcgaaacaccatatatcaagctattaacccagctgtacggtgacagactgctgattgccaacgccaccggttgttcgtccatttacggtggcaacctacctaccacgccttacaccaccaacgccgacggacgcgggcctgcctgggccaactcgctgtttgaagataacgccgagtttggtttgggtttccgcctgacggttgatcaacaccggcagcgggtattgcgcctgctaaacactctggctccgcagttgccgccagagttggttgaccagttgctcagtgaagctacgccggaagtacgtcgcctgcaagttaaccaattacgcacgttattggcgaatatcgacggtaatgacgccatacagttagccaccgatgcagactatctggtcgataaatccatctggctgataggaggcgatggttgggcctacgacattggtttcggtggcctggatcacgtactcagcctgacagagaacgtcaatgtgctggtgctggatacccaatgttactccaataccggtggccagcagtctaaagccaccccgctaggcgcagtcaccaaatttggtgagcacggtaagcgtaaggcacgtaaagatttgggcgtcagtatgatgatgtacggtcatgtttatgtcgcgcaaatctcgttgggagcccagctcaaccaaacggtaaaagccattcaggaagccgaggcctatccagggccatcgctgatcatcgcctacagcccttgcgaggagcacggctacgatctggcctacagccacgaccaaatgaaacagctgacagccaccggattctggccactttatcgcttcgatccgcgccgagccgacgagggaaaagccgctttggcactggattctcgccctccgagcagcgatctcaccgccaccttgctgaaagagcagcgtttccgccgcctcaatacgcaggaacctgaggtggccgcccagctatacgccagcgccgagaaagatctgaagaaacgctatgatttcctcagcctgctcgctggtaaggctgaaaaagcgcctacggagtaatccggcccactgaggttaattcattaagccagtcgaaccaagattgactggcttttttattggcttttgcgagatgtttcgcattagcgaaagcaatgatgtttatttcaacacatcaataacatctatctatcaatagacttgataaactcgttttaaatcaatcatacttacggttcttttgattctaactaaagcactatcatccgtttcatgtttacatttacgactgacaacttgaatcactaaaagggaataaacgtggattttgagacatataagaacaatgttatacaccacgaagttgggcactggtttgtagctaataaattaaaactaaatccgggaaatatagaaatagagataaaaaaatgccactctggattttcgcattctgctacatcgcacattgatttagcgccctcattaaagaacctggctgatgtcaaaacatatttaattaaccggatttgcgtgttatacgcaggcacagcatttcagtctgaacaagaagatagatccgcagatcaaatattagaatgtgaaggtaaagatgattattcaaaactcaatgagttatgtttcgttctcagaggcctaaaccatcctgacaatacccaaaagtgccatgagttagaccaacgtaatgagatagccatagagtgctggggcaaagtgatgaaaatacgatctcattatcataaagaaatacttaaccttactgactatatttcaaataaagtcaaagaaaccgataagaaatatacgttcacttgcaaagaaataaagcaaaagatcaaccgctagtattttgaatgacattggactgactagaacgatgaatcacacgttggcattcggcttcgcaagccttaccgtacgcgccacacctatacatatggtggttattttgtagcgcaaaccggctttgacgactgcacaaatggggcatgataacgctcgacggcttcccgagaatccgttgtatctgctcaacgcaaatgaatagtgatcaaattggtttatagaatgataaactcgcactatagaagctatgtatcaccatgccccaactgaatacgagttatgattaaatgttagaaaaacaagaaattaacaaaaaagaacagtacaacctgaataaattgcagaaaagactacgccgcaatgtgggtcaggctattgccgattttaatatgattgaggaaggcgaccgcattatggtctgcctgtctggcggcaaagacagctacaccatgctggatattttgcagaacctgcaaaaaagcgcgccaattaatttcacgctgattgcggttaatctggatcaaaaacagcctggattccccgaacatattctgccagcctatctggaaaaattgggtgtggaatacaagatcgttgaagaaaacacctacgggattgtgaaagatattattccggaaggtaaaaccacctgttcactgtgctctcgtttacgacgcggcattctttaccgcacggcgacagagctgggagcaacgaagattgcgctgggtcaccatcgtgatgacattctgcaaacgctattcctcaacatgttctacggcggcaagctgaaaggtatgccaccaaaattgatgagtgatgacggaaagcatgtggttatccgcccactggcctactgccgtgagaaagatatcgaacgttttgctgaagcgcgtgaattcccgatcattccgtgcaacctttgcggttcacaaccaaacctacagcgtcaggtcatccgcgatatgctgcgtgattgggataaacagtatccgggccgtatcgaaacgatgtttagtgccacgcaaaatgtagtgccttcacatttaaacgacggttcgctgtttgactttaaaagtattacccacggcagcgaagtgattaatggcggcgatttggctttcgatcgtgaagaattaccgatgcagccggtaggctggcagccagaagaagatgaagaaaacgggaaaccgatgattgagcgtcttaacgtggtagaaattaagtaaaaagccactagttaatgaatacgaatgctcggattcaccgtaatccgggcattttttatgcctgtcgtttttgcgcataaaaaaatgccggtgtctattcaacgccggcatcgtaacaatcaatgtgctatgcagtactacaaaattaaaaatcttacaaatatggagcacaacgcccatcgcttgacgttgcattcacctgcgagatagataatgcctgagcctggtaactcaaatgttgatattgctcaatattgaagggattagcatgtttattaccacctttttcaactatcgctatcttgctgagttataaccatttactgcgttttaaccaccaggcaacagcaagcaccaaagcaactaacatcatgcagaaagcagcaaaaccgaatcgagcttcattaccgggaataccgccgaggttgacgccaaacagcccggttaaaaaggttgtcggcagaaaaaccatggccaacagcgacatggtatacgttcggcggttcatcgcatctgccattaacgaactgatttcatctgccagcactgcggtacgagcaatactagaatctaaatcttccaatcctcgtcctaacctttcggaaatctcctgcattctgcgccgatcgtcatcattcatccacggtagccgctcgctggccagacgcgagaacacatcacgctgtggagccatatagcgccgtaaaacaatcagttgcttgcgtaatagcgccatttgcccgcgcgcgggaacctgctgctctaacaaatcatcttccagatcgatgattttatcgtgtaaatcttcgataaattcattggtgtgatcggtcaacccatcggctatctctaccaaccatctaccgctatccgttgggccagtgccactttgtagatcgttaagaacatcatctatagagtaaatccgtcgatgtcgggtagaaacaataagtttatccgtcatataaacgcggatagtcaccagctgatccgggcgggcatcggcgttaaaattgatgccacgcaaagtgatcatcgttccgtcgcccagccgcgtcacttttggccgcatactgtcgccggacaaaccatctcgcaccacttccggtagcaagggcgtattgcgtagccaatcgatactgtcctgacgggtatagtccaaatgcagccaacacggatgttgagccgttgctacggcgtctggggctatgggcgttacgccacctttaccatcgagttgatacgcgtaaaccgcgtccgaaacctgaagtgcttttccttcgacctcatccacaaccctattctcctcaatcaccgaccttcagcataggaatgattcagtctagccttaacttcttgaagtttaaagccgacaaggcacggataagccagaattggctaagcattagaggggaatgaatcggtttggcggagttgttaggataaaaaatccccgtaaccagattacagggattttatgatactgaataaactaacgatggatattcactgcaaaacgcagatcaatgtttaatgatgtacatcgtttgactgtaggctacatcttccggattggtaatcggataaccttttacccaaggcttaattaagcggccattggtatattgataaataggtgcaatcggcgcctgctcggcgagaatctgctcggctttgttataatcagcattcagcgctttggcattagtttgtttgctggtatccgccatcagtttatcgtaatccgcattattgaatttggctatattcccgctgtgactggatgttaataacgacaggaaggttgacggctcattataatccccaacccaggatgcacgcaccacgtcaaaattgccggtattgcggctatctatataagttttccattcctggttaaccagcttgacatccacgcccagttttttcttccacattgaggcgaccgcaatcgccagtttttggtggttttccgaagtgttatacaacagcgaaagttttaacggattattcgggccatagcccgccgcattcatcaacgctttcgcctgcgcatctaattcagcctgactgtgctgctgtaagaaattatccgtcggcttatatccagccgtcacgtctggggtaaagtgataagctggcttctctccggtacctaatactttttccgcaataattttacgatcgatcgcgtaagacagcgctttacgcacacgaacatcgttggttggcgcccgctgagtattaaacgcgtaataatacgtcccgagctgatccggagtataaacctgcccaggaatatcttttaacagcttctggtacatgtttttcgggaaggactcagtgatatcgatatcaccggcctgataacgtttagtcgcgttggattcctgattaatcggaataaacgtcactttggtcagcaccgtatgggcgtgatcccaataattttcattgggtaccagcaccagtttttcatttaccacgcggtcttgtaatttaaaagcaccgttaccgaccaaattacccactttagtccagttattgccatatttctcaaccgttgctttatgaactgggaacatactgaaatttgccatcaggcttacaaaataaggcactggcttactcagttgaactttaagcgtgtaattatccactgcgctaacgcccaattgatccgccggtaatttaccggcaataatctgttccgcgttatttaaaccagctaattgcgcaaaccaggcaaaaggcgacagatttttgggatcgaccaaacgctgccagctatacacaaaatcattagcagtcaccggatcgccattggaccagcgcgcgtctttacgcagcgtaaatagccagatttgattatctgaagtttgccatttctccgctacgcccggaataactttgccgttggcatcctgattcaccagcccttcaaacaaatctcgcgcgacctgcgcttccggcaaaccaaccgcttttatcggatccaaagaagcaggctcatccttaatatggcgaacaatctcttgtttatcagctaattgtgtacccggcggcacctcagcggcataggccgagccgagggatgccccgaccacagcggcacataatgcataacgaaaatattgcataattgatgaccttatcgttgttaatccatgccataaatgagccacattccactggctctgacttgtcattctcccgtcagcgaaaattcttgatgctgccaggccgggtactcaactaataaatctaacctatcattattttcaaatctattacttattagatatcaatagctaatagtgcggtttatgccaaataatcaccgaatacggcggcgtttgtatcggaagaagttaagtgataatttcatgactgccgaaccaagacatctaaagagaaccccatgacacagcttcgtccccgcccacttcgcggccatttaccaccactaggaaagctctacggcagttcgtttttaggtgccccgctgctttacttccccgctcaaacgccggcggcagataccgggctgattatcgccggtacccacggtgacgaaacggccgcggtcattacgctatcctgcgcgttacgcagcatttctaccgaacaactgcgccaccatgtgattctggcggtcaatccagacggctgtcagctcggtttacgcgccaacgccaacggggtcgatctcaaccggaattttccagctaaaaactggcaatccggcgagacggtttaccgctggaacagtgcggccaccgaacgggacgttttattatcaacaggaagcgaggcgggttcagaattggaaaccaaagcgctatgtcagattattggagaactggctccagcgtgggtcgtttccttccacgagcctttggcctgcattgaagatcctgatagttcaccgctaggtcattggttgtcagaacaatttgatctgccactcttaaccaacgtgggttatgccacgccagggtcattcggcagttggtgtgcagatatttccctgccttgtatcaccgctgagtttcccccgatttcagccgacgccgccagcgagagctatctggcagcgatgattgcccttctcaccagaccctagccttgggattaactggccaactgattaatcgcgccacaggagaaattcaatccttccgcgacgtcgctggccaaccaggttgggccatctaaatcgataaaccgagctacgggtgccaaaggtaacgcggcgcgaatagcccgcgaggtgcatagcatacagcccagcatcatttcaaaacccagggcttttgcctgctcggccagcagtaaagcctcggttaaaccaccgcttttatccagtttgatattgaccatttcatagcgtccaaccaatccctgcaaatcttcacgcgtatgacaactttcatcggcgcaaataggcagcggatgaataaaatgctgcaaagtctcgtctttatccgcaggtaatggctgttccagcatggcaacaccgaggtctgccaataattgacaacgcgcggccaagccttctggttgccaggattcattggcatcaacaattaatatagcctccggcactgcggcacgaatggccactaaccgctccgcaatcagatgatcgtccagtttgatttttaacagctttgcgccctgctgtgacagcaaacgcgcgttgtaagccatggactccggcgtaccgatactgacggtttgcgccattgagatagcatcgagagcctgggtatgactcaattgccacaagttttttcgagtcagcccgcattccagttgccataaagccgaatcaacggcgttacgcgccgcacccgccggcaataattgctgtaacgcatcgcgggaaatgccgtattcgatcgcatcggcaaccaatgccaactgcgccatcacggaagattcactttccccataacgtgggtagggagtacattcacctacgcctcgaatgccattttgctctatttcgaccaccacaaccttggcttcagtacggcttccacgcgaaataacgaacgcggtgtgtaacggccaggattctgggtaaaaacgcatcgttctcataatggctcccaagctatgtgatcgctgaacctaaggaatagcaggctaactcatcaatatatacaattgtttagagaatttcttatatgcaattgcctattgttaccttaaactgaaatccgtgttacatatctgtaaaggaatcttaaatgacacagaccgtacattttcaaggcaatcctgttgccgtagcgggtaaacttccgcaagccggcgagaaagccaaagacttcactttggtcgctaaagatctttctgccgtttctctgagagattttgccggtaaacgcaaagttctgaacatcttccccagcattgataccggtgtttgcgccgcttccgtgcgtaaattcaatcagttggctggcgagcttgagaataccgttgttctttgtatctccgctgaccttccatttgcccaatcacgcttctgcggtgctgaaggcctgagtaacgtagtgactctgtccaccctgcgtggcgctgaattcaaacaagcctatggcgttgaaattgccgaaggtccattagccgaactgaccgcccgtgccgttgtggtgctggatggcaatgacaacgtaatttacagcgaattggtgaatgaaatcactagtgagcctgattacgatgccgcattagccgcgctgaaataatagctcaacgcagatagcaaaacggctgacatcgcgtcagccgtttttttaacgataaacgttatttaacgataaatagcagccattgctgaaataccctctattcttggttcttattcttggctctcttcgttttcatccacggccgggcgacggctgccgctcaatccatattcccgcagcttattggctatcgccgtatgggaaacgcctaagcgtttcgccaatttacgcgtactcggataattacgataaaggcgggttaataccgaacgttcgaaacgcttactaatatcgtccagcgaaccgtccagcacctcatcccccaacgacatctccacttcaaattccggcagaataatgtcctgtgggcgcagttctacgccatctagctgagttaaagcccgataaatggcattcttaagctgacgaacgttacccggccagccgtagcgcgtgaggaatccgttaagttccggtgacaacttcggccgtggtacgccttgctcatcagagaaacgggcgacaaagagttccaccagcggcataatatccgttgggcgctcgcgtaatggaggcagtgtgatggtcagcacgtttaggcgataatagagatcttcgcggaattcaccgcgctgaaccaattccaccaaattcttctgcgtcgcgcagataaccctaacatccacgtggacttcatgctcttctcctacccgacggaaagtgccgtcgttgaggaaacgcagcagtttgatctgcattcgcggcgacatttcaccgatttcatccaacagaaccgagccaccgttagcctgttcaaagaatccttttttaccttccaccgcattgggataggcgcccggcgcatagccaaatagctcgctttctaccacgtcgtcaggcatcgatgcacaattcagaccgaggaaaggttttttgccgcgaggactgcgcaagtggcaagctctggccagcagatctttaccggtaccggtatcaccaattagcaacagcggcgcatccaacatcgccaatttgcgcgcctggtctaaaacctgacgcattttgctgctcacggcgacaatttgtctgaattcgctgtcatcgttaaccgacagggtttgcaattgctgccccatacgcgcggtcgatttcagcatcaccaccgcacctaccgtttggttatgctgattttcatccaccaaatgaataggtgtcacttccatcaggtaatcctgactgtgaatcagtattcgttcggtatgaggcgtggtttcttcccgctcaaaccagtgggaaaaattaaatccccccagcagcgtacccatagtcttatgacgaattttctcttcgttaaaagaaaatagctcgcgagccgccgggttagccagttcaacgttgcctttaagatcgatggaaaaaacaggctccggcatggattccagcaaggcgcgcagcgcgcggtgctcacgctcagaaggcatgaaaggaacggtgcgcacgtcggtaaccccgtcgatacgccgaatttccgccatcagcgcctgaaacacggcaaaatccagtttggagaaattcagataaatacggccgataggatcaatttcgatcccccgtaaatcaatgctgcgtaaaaccaggagatcgagtaactctctggtgagacctatccggtcttcgcaaaacacttccaagcgcatcagtattgaccttatctttgcggtacgggatgactaagtttgataataccctgtcccttcgccctgatgaagagatctgtcagcaaaagttgacaggaatcctctttttcgtttcatttgtcttcatttggtcttttttatagcgatatgaaggcattatccccgtcgttgttgaagaatctcagggtgatattatcttcaaaatcaattatgcagatgaatataatatattcgtagaagcggccgtcctgtcaagcacaggtgacactttgcaatcaatacgccaactggctatagtaaaggtagccagttgaccgaggaggttgcatgagaagttaccacccaagcccgaccactagagtcagcgcgttatggcgtgaaatcgggctgcccgccagccgcggcaccgcgttggtagacagtattaagctcggtttttccgtcgacgttattgatacgatccatctgtgggcagcgatgccaaaggccgaaatcttgcgtgccaccggtattcccagccgcagcctgacacgccgtcgcactaatgatggacgatttactccagaagaaagtgaacgtattgctcgttttgtccgagttatggacgcggcggtagatttgttcggcggagatcgccccaaggccacggcatggatgtcaacgcctgtgagaggtttgggcaatcgcactcccgattccctgctggaaaccgaaaccggagcgttggaaatatgtgacctgattggtcgattggaacatggcgtctttacgtaatggagctacagttttgatgctataccggattgtccataatcgttttgccgctacggcctggtcgggttatggagcggaaacctacggtggtcgctggaatcataaaggccacagcgcgatttatctggccagcagtatttctctagcaatgttggaaacactggttcatgttgaagatagcgccactctgaacgattttaatctgtttcaaatcgcgattccggataacgctattatggccttgcaacaggaagattggcctcgaggatggcgagacgatccggctccggtggcgacgatggatatcggcacggaatggttaagctcagtttcctccgtgggattactggttccatctacgttggtgccgctggagagaaatgtgctggttaatcccaaacatcgtgatttccccccttgtctcaccagcgtcaccccactcgacttcagtttcgacccgcgcctcaaatagcccgaaataaatggccttagcgctgtttgtctttcttaggcagcgtattcttcagctgcgtaatcaattgacgacggaaatcccccagttttggcttatcatcatccatccagggcagcgggcgacataactccatcgctttgatccccaaacgcgcggtgagtaaacccgcaccgattccctgcgccgcccgagcggataaacgcgcggccagatcctgcgatagccagtccataccgacttcccgcactaattccgacgcaccggcaaaggcaatattcagtaaaaccaaacggaacaggcgtaaacgactgaaatagccaagttcaattccatacaacgcggcaatacgattgattaatcgaatgtttcgccaagcgataaaagccatatccaccagcgccagagggctgacggcgatcatcagcgccgattctgccgcatagcggcttatttcagatcgagcctgattatccaacgtcggttgtactaatttggcatagagttcaaccacttcccgatcgttatgcgtttcatgcagcgaggcttgccagcgctgtaacgccggatgtccctgatccaaacccgcctgacgcgccagtttctcgcagaattggcgcccacggcccaaaccgtggcttaccagtaactcccgcgccacgtcacgttcttccgcgcgctggcgcagccgatataaccgccgccattcggtaacaaccgaaccaatcccggcaaaaacgatcagtccgccggctaccgtggtgcccaaggctatccagtcctgctgctgccacgcctgattaacccactgcaccgcctgcgccacgacgctcacgccaaacagcatcagacctgccgtcaccatttttcgccatagactgcgttttggtttaagcgccgcgcttaccagaccttccgcacgcccttccgcttcgtccgcgtccagaaccggatcaaccggcaaaaaattctcggccgcggagccactaaaggtctgccccgtttttaactttggctcttcgatcggctgcaatggctgttgaaaatctatccgtggtttcaatggttcattcatcgcagtttatctcccaataaaaactccatcaccgcatccagtcggatatgcggcaatgggctatccacgtgcacttgttgtggacggaactgatcaaaatggaagccctgttgcagccaaaatgccgggccgggcaaacgtgccggaacatcgccagggaacaccgtcagcggcgcaccgtcttccagacgatgaccttttaatgccggaattcgctggccattatgatcgaccataccgctttccgtggcctgtaccgacgccagcccgacacaatccatgctgatgccttcgaacgccgcattttgccaggcctcctgcactaattgctggagcaatgacaccagattggcatgttggtccgcagttacatgatcggctttagtggcagcgaacatcagcttatcaatacagggggagaataaacgacgaaatagcgtgcgttttccataatgaaagctttgcataagctgggttaatgccagacgcatgtcgttaaaggcttgcggcccgctgttcaagggttgcaggcaatccaccaggacgatctgtcgatcaaaccgaataaagtgttctttataaaaaccttttacgattgattggcagtagtaattaaaccgcgcgcgcaacatacccaaattgctgtgtttgtctgcctgagctaaacgagactcatcaatcgcggtgatatctggccaagggaagaactgcaatgcaggcgcgccggccatatcaccggggagcacaaagcgccccggctgaataaagtgcagcccttcttgcttacagcgaatcaggtactcggtataggcctgagcaatcgcggcaagtaaattttcgtccgccggagccaaaggatcgcactgtttgcacaattccaaccacggtttagcccattcggcacggttaccctgtaacaaaccgcccatttgccgcgaccattcgaggtaatcctgctccaacatgggcaaatccagcagccattcacctgggtaatcgacgatttccagatacaaggtcgatgtctctttgaaatgacgtaaaaccgagtcattcgacctaaatttcagagccagacgaatttcactcacgccgcgagtcggcgtcggccagctcgggggcgtaccgtacaatgaggccagaccttcgtcatatctaaaacgctggatacccaaatcccgctgaggcacccgcttgacgccgagtaagcgatcttcgcgcacggcagaaaacagcggtaaacgcgccccgctgtgtacatgtaataattgattgactaacgcggtgataaacgcagttttaccgctccgactcaggccggtcaccgccagtcgcaaatggcggtccatcccgcggttaactaaagagctgatctcattttgcagtcgtttcatgcttttcctttgcaaatcggccaaataccgcacctaaaccgcgtctcaataacggttccaacaacacagccagcgcccaacgcagcggtttacggctcacgctgcgtaaaatccaggccgtggcaccggccgggccgtagcttaatgctgcggtaataatcactttaaccagcgttttcaatactacacctgaccgctgagtggcgacgttattcttcatcatttatgccctccggcaggtcatttttcgaatttcagctcggtaaaagtcataaatcagcccactggccgcatgaattaccgattcattgcgctgcggattcgttatagctgacgaaatctgctgcgaacaccaaaagtttccgaagtaacgtaacgctctacttgccgcaaacgttgctctccgctgcttaattcgtaatccagtttatccagcagttggcgaggagtttgatagtcctcatccataagagtgctggccggtactgggtccaacatataagtcagcaccaggtaggctacgatggtgaaaacaaacaggccgaaaaacatcgataacacggcaataatacgtaccagtttgaccggaatatccagataatgcgctaaaccggcgcacacccctttcaccatgccttcttccggcacgcggtacagtttttttccactaaacaaaccggtcattatgattgcctccagttcggatgttctgcatccagaatttcttccagcgcctgaatacgttcgcgcatacggcgcgcatcatcagctaactgcgctaaacgctgcatttcctgatggctaagctgggtgccgctttgttggcgattgctgtaatgtagccagagccagatcggtgcgacaaacagcacaaaaatggttagcggaatagctaaaaacagaatactcattctttccccttatttattcttatcaacggcaatgcaatcatcatagccgcaagattcgagtaataatatggccgcaaccttttgggataacggcccacttttattactctttattattctggagcattcatttttgcttttaacgccgctaactgactgctgatttcatcatcggctttcaattctgcaaactcttgttccagtgacttctttttaccgatgctgacgctttccgcttcggcttccatatgatcaattcggcgttcgaattgctcaaaacgagccattgcctcatccagcttaccgctatccaactggcgacgaacatcgcgagaagaagaggcagcctgatgacgtaaagtcagcgcttgctgtctggcgcgggtttcggtcagtttgctttccagctcgccaatctcatgtttcatgcgatccagcgtttcgtctacggtagccacttcacgctgtagggtttcgatcagggaagccactttctgtttctcaatcaaagcggcacgagccaagtcttctttatctttacgcagcgccaactcggccttttcctgccattcaaccagctggctttcacccaaatcaatccggcgcattagctgtttcttttccgccaacgcgcgagcagaggtagagcgaatttctaccagcgtatcttccatttcctgaatcatcaggcgaaccagtttttgcggatcttcggctttatctagcaacgtgttgatgttggcattcacgatatcggcaaaacgagaaaaaatacccattgttcacatcctctttaatcatgtgggcgactctatgcgccggttgttcagtgagcaagtctcaccggtacagatacagctctggctataggataatcaaaagtcatgccaactttagaaaatcaaatatcatcatgaattaaaagggaaaataactttattgctaatttcagcataaaaggtagagtgattactttaaccaactattagcgaatctcactatgagcgaacaacttgaaaacctgctaggtgaagcaaattcctttgttgaggtgcttgagcaagtctcgggattggccaaattgaataaacccgtactggtgattggcgaacgcggaacgggtaaggaattgattgctcaccgtttgcattatctgtcgaatcgttggcaggggccgtttatctcgctgaactgtgcggcgctgaatgaaaatctgctggattccgagctgtttggtcatgaagccggtgcctttaccggcgcgcaaaagcgccatttaggtcgatttgaacgcgccgatgggggaacgctgtttctcgatgaactcgctaccgccccaatgctggtacaggaaaaactgctgcgagtcattgaatatggccatttggagagagtcggcggtagccagccgttacaggttgacgtgcgtttagtttgcgccaccaatgataatttacccgctctggccgccgcaggaaagtttcgggcggatttactggatcgtctggctttcgacgtggtgcaactgccgccgctacgccagagacagcaagatatcatgctgctggcggagcatttcgctatccaaatgtgccgcgaacttgggctgcaattattccccggttttactctacaggccaaaagccagctgctgggttatcattggccgggaaacgtgcgagagctgaaaaatgtggtggagcgctcggtttatcgccacggcgatagcccggatctgctagacactataattatcaacccgtttgctgcccatcagaatacccaaccccaccttccaacggaaacggcttccctgcccgcgctccccgttgacctcaaagcctggctacaaaacggcgagaaacagttaattatgcaagcgctggagcaggcgcgtttcaatcagaggaaggcggcggatttattagggctgacctatcatcagttacggggaatgctgaaaaaacactcgatattgcaagccgccacagatgagaataacgaagaatcggcgaatgactagctagcgaccataatttttcgcttatttattttcgcttatttatatcaggcagaatgatataaaacagggctaatgacgtggaaatccgaggcataaaagatgcgaataagctgaaaagttaatcgcaagtaaaaaaaaaagccagcacccgagctggcttaaaaaacactggaagcaatgtgagcaatgtcgtgcctttctatcagaagctccctactggcggcctcttcctgaagtgcgaaacaatgataatggttatcactagcacttgtaaatacttttgttgagaatttttctcatttccacaacgatattgtggctcttcaattatcctcttcacgttatgttttaacctaatccgatacccctattctctgtctggaatcctgtctgcttcaaggtaacggccgaaatggattaacactcaaatttatcgatcgttattctgcctaagcgtagccagacacagtaacgtgaatagaatctgcgccccaagattcgccgtattactggtaggatcatactgcggcgcgacctcaacgatatctccaccaaccatgttgacgccggccaaccctcttaacatgccaaataattctcgcggcagtaacccattgacctccggcgttccggtgcccggagcaaaactgggatcgagagaatcaatatctacgctaatataaaccggcccagtccctacaacggttttcacttgctcaacgatagagtgaacgccacgctcaaaaacggcttccgcatggatcactgtcatgcctgaatcgcgagagaactcccaaaaatactcatccgggccacgaattccaacttgcaccgtgcggcaaggatctatcacaccgtctaataccgcctgacgaaacagcgaaccgtgatgctgattgccgtaaaaaagaccggcggtatcacaatgagcgtcaaaatgaatcacaccaaccggccgctctgcccccaaagcccgcaaaattggcagcgtcatggaatgatcgcctcccactgacagtggcaaaatgcctgacgctttcaggcgagatagcgtattttgtatatccaaatgggcttgcgtgaggtcaaaacggttgctaaacaccacgtcgcccagatcggcggcgctaagtaaccgagctggcgcaagattcagcacatgatcgtaaggcccgatacgttccgcaacgcgcagcgctttagggccaaaacgcgcaccagcgcgatgcgtcacgccgagatccatgggaacgcccaaaattccaacgtcggttccctgccattgatccggcgaacggaacggtaaatcgagaaaagtggaaatatggtcaaacgcccatgtagcctgcgccttagcatcagggaagaaggtttctgccacctgacgataattttcatcatgaatggtaaaagcgtcttttcccgcatacttcgcccgcaatttattgagtgagttcatatttaaccggcctcctgtttcacagcgtccgagcaggaataaaactcgaagcgatttgcggattctgccagcactgccagtaaatgctgtacctgatcgggattattggccgcggtgagctgcacgcggaaaccgacttcttttttgggtaccagcggatatagcgccagcgtgacataaactccgcgctcaaacagataactgcctaacgccataatttgccgtggatctttcagcggtatttccatgataggtaattcagaattattcaatgtaaaaatatcaagatcggctaaccctttgagcaattgtcgacacatttgatgcagatcgcgacgtaattcctctcctttttgggcgttaaccgctaaaccactcagtgttgtggccagcgaagctaccggggatggccccgaatacagataaggcgacgcggcaactttaatcatttccttcaataccgtcggcagcgccataaaagccaacaatgatgaataggatttggataaacccgccaccagcagaatattgtcgtagctcaacccacagtggcgaacgataccgttccctttatacccccacggcatttctccatcgggattttcacctatcaaaccaaaaccgtgggcgtcatccacataaaggatgacgttccagcgccgggctatctcggcaaaacgcgctaaatccggcagattgccggtcatgctattcaccccgtccatgcaaattaagcgcggcggcacggggctactagctaataatcgttctaattcatcggcatcgttatgtttaaagcgaatcagcgtagcaccttgcccctgcgccactttacaaccgtcgtaaatggttttatgggcccgactgtccagataaattgcgccagtaccgctgaggaaaggaatcactgaaagatggatatgagtgatagtcggaaaggccaatatatccggcgcttgggtcaaggccgctaactcgcgctctatatccctataaggcgtgggtgtaccaagcattctcgaccagctcggatgagtaccccattgacgcaccagaggtaatattgacgcctgaacctgcggatttagatccaaacccagatagttacaggaggcaaaatcaatcagttcacgttcgccaatcactatcttgcgtccgtcaataccctcaataacggcatcaaccatagggtgagcgggaggtgtaagtggagaatgagcgaaatgtgtgtccaaccatttcgccatccaggatgggacggtttgctgattcatcattaattcctatagtgatgcgttcagaattattcaccttgatacgatgagagtgcccactagtattgtgataaccaaaaactataggaaaggacggtaaaagcagcaattgctcaattatcgtgcaacgtaaagctagaatgacacaatgagtaatggggttataattgctgttatttccccccaatcggtataaacacaagagccgcgaacgatggcacgatttgcgatcgagctgtagccgcctctggtcactgcggccccacgtctagaatgaatcaccatgccatcctgaatgttagaatgcgcaccgatctgatctgaggtcactggccgaaaggatttttacgccgcatgattaataccctcgctactgataacggcgacggcgttgtgggcatgcaggctttcctgatgctccaccctaactgaaaatgccgaatagcggcattgcttacgcagcatggcgtacaaacggcgcgccgcgtcctcgcagaacatcagattttgtccattagccaatgcaaacgcctgctcatcctgacgtttcactaaagtttgtaccggtgttcccagcgtattttcaatttggttaattaattccagtaccggaaaattcatctcagtggatttaagtgacaccgtcactcttgcccagctgcgttgactgtgcggcgttgctggcattccctgcgttccaagccaatccagcacctgttgctgggtcagattttcctgctgttcaaaatccagttgaaactgctgctgagcagactgaatactcaacgctaccgagctgggacaagtggaagaataaggtacggacagagatagccggagccggagctgaagctgttgttcgagctgggcgtcaatcgtcagtgggtaggccttccagcctctttgcggggataacatcgccggtcgcgagataaaaatatcgctggcaatatgcaggctagcgctggcggctagatcgggttgagaagctaaaaatgcggctaacgtggtgtgaatgcgctggggcgttaattccccttgagtcaattcatctaatgccaagtatatacgggacatatgaattcccttgctctgccctttagctttgacaccaatcccggcattcacttttgcagatagcggcctgccaacgatgtctaacggtaacgcaatgccttccatgccgacccaatccagctccgtattgccaaaatcaatgtatgaagattgtacatctggtaacgccgttagcgattgattcgcagctattttcatgtcgtcctctatgtgtgctttattaatatcaaataaaggtaacatgcaattgttatagtataacatatcgaagttgcgtttttttgctctctttcggcgcttttgcgcataattacagcaatatccctgagatcagtgagttgttttgctcaatggattggggggataaccagtttacggtacactaagtctattgcttacttacagttgaagcgttttatgcgtggtttactcatttggctgctgtcgcttggctgtctagcgacaccagcgctggcacaaactcagccagccccccaagcgattcaaccgccgccggatatccgccagcggggtttcgtctattgcgtcagtggcgtgttgaatactttcaacccacagatggccagcggtggcttaaccatcgatacgttagcggcacagctttacgatcgcctgctagacgttgacccttatacctatcgtttggtgccggagcttgctgatagctggcaagtactggacaacggtgctacttaccgtttccatttgcgtaaagatgtgcctttccaaaccaccgagtggtttaagccgacgcgcatgatgaacgccgacgacgttgtctttagcttccaacgggtatttgaccaaaaccatccgtaccacaacgttaacggcggggattatccctactttgatagcctgcaatttgccgacgcagtacagagcgtgaaaaaactggatgattacacggtagaattccgcctaaaagcgccagatgcctctttcctgtggcatttagccacccattacgcgccggtgctttccgctgaatacggcgatatgctggctgccaaaggcaaaaaagagcagattgaccgcgaacccttaggtaccggaccatttatgctcaatgagtatcgttctggtcaatatattcggctttctcgaaacagtaattattggaagggcttgccgcgtatgccgcaggtcattatcgatctgggcgctggtggcaccggtcgcttgtctaaattactgaccggcgaatgtgacgtactggcctatccggcggccagtcagttgtccattttgcgagatgacccgcgtttacgcctgacactgcgaccgggcatgaatatcgcctatttggcatttaatacccgtaaaccgccgttgaacgatgaacgcgttcgtcaggccgtcgctttgtcgattaataatcaacggctgatgcagtcgatttattacggcaccgcagaaaccgccgcatcgattctgccgcgcgcctcctgggcttacgataaccacgcgcaggtaaccgaatacaatcccggcaaagccagagaaatactgaaagagttggggatcaaacagttacagctgaatctgtgggtgccaactgcttcgcagtcttataatcccagcccgttaaaaaccgccgaactgatacaggcggatttggcgcaggttggcattactgtgaatatcgtgccggtggagggacgttttcaggaagcgcggttgatggaaatgaaccatgacctcacgctcaccgggtggtcaacggacagtaatgatcccgacagtttcttccgcccgttattaagctgcgctgcaatacgctcgcaaaccaactatgctcactggtgtgacccagctttcgatgaattactgcaaaaagctctgcgatcgcagcagatatcggaacgcattgactattaccaacaggcgcagcgcattttggagcaacagttgccactgctgcctctggcttcctccttgcggctacaggcgtatcgttacgacatcaaaggtctggtgctcagtccctttggcaatgcgtcctttgccggggtgttccgcgaaagtgacgagggtaaaaaaccatgattatctttaccttacgtcgcctgttgttattagttatcacgctaatcatgctgtcgctggtgagttttagtctgagctattttacgccccacggcccattgagcggcgcttccctgttcgatgcctaccgtttttatttgcatagcctgatgcaatgggattttggcgtttccagcattaacggccagccgattagcgaacagctgcgggaagcttttcccgccacgatggaactctgcgtattagcattcagcctcgcgctattcatcggtattcctttgggtattattgccggtgtaatgcgaggaaaatggccggatgtcgctatcagttctctggcactgatcggtttttccatccccgtattctggctggcgctgctgctgatgctttttttctctctgcatctgggctggctgccggtctccgggcgtttcgatctgttatatcaggtcaaacccgtgactgggctggcactggtagatgcctggctatccaattccccttatcgcaaggaaatgatatatagcgccttgcagcatatgatcctgccgataaccgcgctggccgtggcgccaaccacggaagtcattcgtttgatgcgcatcagtaccgatgatgtgatagggcaaaattatatcaaagccgctgcgacccgcgggctgtcgcggctgaccattattcgtcgtcatgtgctgcacaacgccctgccgccgattattcccaaattgggcttgcagttctccaccatgttgacgctggctatgattaccgaagtggtattcagctggccggggctgggacgctggttgattaacgccatccgtcagcaagattatgcggcgatttctgctggcgtaatggtggtgggaacgttggtgatcgtgattaacgtgttgtcggatattttgggggcgatgatgagcccgttaaagcataaggaatggtatgcccttcgataatgtctaccgcgaaaagaaaatgcctagccccctgctgtatacctggcgcattttctacgccgacactttggcaatgaccggattttatggggttattgccctgattttgctgtgcctgtttggcaatatgctggcaccctatgctttggatcagcaatttctcggctatcaattgctaccgccgtcctggtctcgctacgggaatgtttccttcttcctcggcaccgacgatctcggccgcgatattcttagccgtttattgaccggcgcagcctccacctatggttcagcgctgctagtgaccgttgccgccgccctgtgcggcgtggtgttaggcgtgctggcgggcgtcactcacggttttcgctccgcgattttgaatcatatattagataccctgctttctattccgtctctactgctggcgatcattgtggtggccttcgttggcccaagcctgcaacacgccatgtttgcggtctggttagcattgctgccgagaatggttagaacgatttacagcgcagttcatgatgagctggataaagaatacgtggttgcggcgcggctggacggcgcttcaacgccttatattttgctgtatgccattttccccaatattgccgccgtgctggtgaccgagtttacccgcgccctctcgatggcgattctggatattgccgctctgggctttttggatctcggcgcgcagttaccttcgccagaatggggcgccatgctgggggattcgctggatttggtctacgttgcaccttggaccgtgatgttaccgggcgcggcgattttggtgagtgtgctattggttaacctgttaggtgacggtatgcgccgggcgattatcgagggagtggaataatgccgttactggatatccgcaatctcactattgaatttatgaccgccgaagggccggtaaaagccgtcgatcgcgtcagcatgaccttgacagaaggcgaagttcgcggcttagtcggcgaatcaggatcgggaaaaagcttgattgccaaagcaatttgcggcgtgagcaaagataattggcgaatcaccgccgaccgcttccgctttgatgatatcgacttgctccagctcagcccacaccaacggcgtaaggtgatcggccataatatttcgatgatttttcaagaaccacagtcctgcctggatccttcggaaaatatcggtaagcagctcattcaggccattccgggttggacctataaaggccgctggtggcaacgatttcattggcgtaaacgccgggctatcgagctgttacaccgcgtcggaattaaagatcacaaagacattatgcgcagttatccctacgaattaaccgaaggggaatgccaaaaagtgatgatttctattgcgctggccaatcagccacggttattgattgccgatgagccgaccaacgccatggaacccactacgcaggcgcagattttccgattgctggcacgattgaatcagaataacaacacgaccattttgctgatcagtcatgatttacaaatgatgagtaaatgggcaaaccgggtaaacgtactttactgtgggcaaacggtggaaagtgcagtctgcgaagaattactggccgccccgcaccatccttatactcaggcgctgatccgcgccatgccggattttggccgctctttgccccataaaagccgtttgaataccttgcccggcgcgattccctcgctggaacatctgcctatcggctgccgcttggggccgcgttgcccttacgcgcaaaaaacctgtattgaaaccccgcgtctgcggatggcaaaaactcacgcctatgcctgccacttcccactgaatctggaggaaccgtgatgaccgaaaccttgcttgaagtgcgcaatctgagcaaaaccttccgctatcgcaccggcctgtttcgtcgtcaacacgttgaagcggtgaaatccgtcagttttaccctgcgggaaggccagacgctggcggtcatcggtgagaacggctccggtaaatctacgctggcgaaaatgctgtccggtatgattgaaccaaccgaaggcgagctgctcatcgacgatcatcgattaagctacggtgattacgcttatcgtagccaacgaattcgcatgatttttcaggatcccagtacctcgctgaatccccgtcagcggatcggccagttgctggatgcaccgctgaaactgaataccgatctggacgccaacgcccgtgaacagcgtatttatcaaacgttgcggcaggtcggtttgttgccagatcacgctaactattacccgcatatgttggcctccgggcagaaacagcgtatcgctctggctcgtgccctgattttacagccgaaagtgatagtggcggacgaagccttggcgtcgctggatatgtccatgcgctcacaaattatcaacctgatgctggaattgcaggacaaacatggcatagcgtatatctacgtgacgcagcatttgggcatgatgaagcacatcagcgatcaggtgattgtgatgcatgaaggcgaaatcgttgaacgtggcagcaccgccgaagtgctagccgccccgctacacgatttgaccaagcgcctgattgccagccactttggcgaggcgctcaccgccgatgcctggcgacgtgacggcgggcgcttttaggcgtccccactgctcggagcagtggaaaagcaccatattcagtccgggcgtgatagaatcgctcggtttattaacgcaaaacgcgctggttaagtcgatgtttcaacaaattgttttaatattcgtcaccactcgcgtcagcacgcaacaatgaccacaaggattactgctatgggttttctaaccggcaaacgcattctgattactggcgtcgccagcaaactgtctattgcctacggtattgcacaagcaatgcaccgcgaaggcgctgaactggctttcacctatcagaacgagaaacttaaatcccgcgttgaaggctttgcggcagagctgggttctaccctgatcctgccttgtgatgtagctgaagatgccagcatcgacgccatgtttgctgaactgggaaaagcctggcctaagtttgatggtttcgttcactctatcggttttgctccggcagaccagttagatggcgactatgttaacgccgtgacccgtgaaggtttcggtattgctcatgacatcagctcttacagcttcgtggcgatggccaaggcttgccgttctatgctgaacccgaattccgcgctgttgaccctgtcttatctgggcgctgagcgtgcgatccctaactacaacgttatgggtctggcgaaagcctctctggaagcgaacgtgcgctacatggctaacgctatgggtcctgaaggcgttcgcgttaacggtatctctgctggcccaatccgtactctggcggcatctggtatcaaagatttccgtaaaatgctggctcactgcgaagccgtaacccccatccgtcgcaccgtaaccaccgaagacgtgggtaactccgccgctttcctgtgttccgatctggcggctggcgtttccggtgaaatcctgcacgttgacggcggtttcagcatcgctgcgatgaacgaactggaattgaaataacccgcagcggatttattcgctcaaggttatccgaatccgctgcctcatcgcagcggattttttttggcttcgatgagttctttgctcagattaattccatcaattaatcgttttttggcaaagttatggccatttttgttatatcaatccatatgttattacttttggttatggaatatggtttaacattattttatctcactaatccgatcggcaatgatatccactgcgtttacctcatcgaaccacaggatatcttaccgatgtcgatgccaactccggtcttctgctatttatccggcaacggcttagctggcaacgttcatttgttgttcttctgtgtttgctcaattgattcggctacagcccctgctgttgctgccgtttttatcagtaaaacaaggagatcttcatggtgcagtttcgacgtcaggataatgcccactggtatcacgagactcaacgtagcgtaacagacgacgcattacgggagggcgtttgtaccagcggccattacggacacgatgatttctcggccttaagcaatagtgagaatctggctaatgctttttctgataaaagccctttcttattgggattagaagcgcaggtcaatccggacttacaggatttgttacagcagcgcgacgaaacgctacgagcctcgcaccgcatgtatcaaacgctgttcccaccccaggtttccctctctaccgagctgactctgtctctctacgatcgtttaagcagcgccttaatcgtggctcaggtcaccggtgttcaacgtttgtgtaatcactatgccgaacgtctgatgccgttatccagcgatgacgcatcgcgagaaagcaatattcgcctcacgctactcacccagtacgcccggcagttagccagtcagccgacgctgataaaccgccgcgcattgcagcagctcagcgattctgggctaacatcactggatattattctcttctcgcaaattattggcttcgtcggctatcaggcgcgagccgtcgcggcagtttctgcgttagcgggttatcccacggtgctgttgcccggttttcctcgaatggaagatgcggaaagcgcgaattttagtgatgaagtgacgggctggcaggcctggctgccggatctgtctttagaaacggaatcgcaggaacaggaacaaaacctgaccttaaccgatgtgttaaaccagcatcctcatagccagcaggtttacgctgatattcttttgcgcatacgggttcccgaccatcacccgcagccggcgttactggaattggcggctctggtcagtgcgcgaatcaacggcagcgcctgttgcctggttcaccatcgtcagcgctacttgcaattaaaaccagacattactctcatcaataaattacagtcaggcattagccagaatttgagccaaagttcgacggaatcagtggaaagctcggtgattcatctagcggcggaactcacccgcgcgccggaaaggtttggtccgccgatactggctccgttgcaagagcgcggtttttcaccgctgcaactgatggacaccttattcagcgtagcgctagcaggctggaccaatcgattagtacaaacattggggtcgcctcgcggcgcattgcagcaggcctggaccgattaaaccggtgccaaccactctctggcggcgtcaaagaaatgctgagccaacggcgtcacgcgccccggctcggcaaccaccacggccgcacggcgactcatactgacaatattcaccggccgtcgcatcagcgccggtgacatatcctccaacaagcttccacgtggaaacaatccgcagcctaaaccgacgaagatcccctgtaataactgaaatattgaggtagtttccaagcgcgcatgcagagagaaacccgcgtcgcgaaagctgttatccagataacgacggaaataacgcgtcggctccgctagacacagtggtaattccgcgacctgagccagtgacaatggagtttcatccaccaaatcagggaagtgctgagggtgaaaaatcaaatctacaccgctgtcttccaaaggctgagactgaaaatgcagctcattcagcgtggaaagctcgaaaaaacctattcccacatccactgagtgaccggttaacgcctccaatagctgatcggcactcagtaccgaaacccgataatccaactgcggatagcgctcgctgacccttttaagcaaatctgacagggaaatgctgcactgcggcaccacgccaatccgcagagtcccgttcaaaccgtgtttgagagactcaacttccagcttcaacccttgataaaccgaaacaatctcccgcgcccaggccagcacgcgttccccttctggagtaaaaccttcgaaattattgccccgattgatcagcgaaacacccagttctcgttccagatttttcaggcgcatcgacaaagtcggctgactgacaaaactggcctcggctgcccgcccaaaatgacgagcctgttccagattgcacaaatagatcagttgtttgatatccattactgcgctcaatatcgcgttatttattccagtatatcattttgctcccctatctcagcggcctgaggcggttttgcagcaaagcctgtctgaactgcgctatccgcgctcagcgactctttctacacttgctcaatccaatcaagcagctctcacccaacattaaaaaccatttggcagacaaataagactttctgcaatttttagccgatttgtgaagttcatggcgattaacccggtcaaaaagatgggtttcaggctgagagtcaggaacagagagtttgcaagacaaaattttacttaaatttgataactggatcacatttcgttatcaggttaaccgcattctgttgcataacaattcactcaattttggataattatggaaaatcctgtatatgcacaacatttagcgggtcatttaaccatgtacaatgtgatgagctattgatgagccaaatagcagaatatatcactaaataaaatccgctcagcttttaatcaaaataaaaaatcggtaaaccgcgaaaacataaacgttaatactgcataacatttgtaacatgggtttattcccctgcctcgcttatatgtaacagagtattacaaagcgcttgtctcattgacaaagatagtgaacattaaccgccgccattcatcttataacaacgcaaaaggatgccgttccgcgcatcacatttgcaaattcctgtcattttatggccggtagtaaaaattagaggtccctgtgacaactgcaaacaacaacagcaacgaacctgaaagcatcagtatgaatgctttcaaacagccgaaagctttttacctaatattctccatcgaactttgggaacgtttcggttactacggcctacaagggatcatggccgtctatctggtgaaaatgctcgggatgagcgaagccgattctatcaccctgttctcatcattcagcgcactggtctatggcttcgtcgccatcggcggttggctgggtgataaagtgctcggcgcaaaacgcgttatcgtgttaggcgcgctgacgctggccgtgggttacaccatggtggcctattctggacacgatattacttgggtgtatatcggcatggcgaccatcgccgtaggtaatggtttgtttaaagccaacccgtcctccctgctttcaacctgctataacaaagacgacccgcgtttggacggtgcattcaccatgtactatatgtccgtcaacatcggttcgttcttctccatgttggccactccgtggttagcagcaaaatacggttggagcgtggcattctctctgagcgtggtcggtatgttgatcaccttggtgaacttctggttctgccgtaagtgggtgaaaaaccaaggttctaaaccagatttcgcgccactgcatttcagaaaactgcttatggtgctgattggtgtggttgcgctagtgacgctgtctacctggttgctgcacaaccaaatcgtggctcgctgggcgctggcgctggtttccctaggtatcattattatcttcgccaaagaaaccttctctctgcacggtactgctcgtcgtaagatgatcgttgctttcctgctgatgctggaagccgtggtgttcttcgtgctgtacagccagatgccaacttccctgaacttcttcgcgattcataacgttgagcattccatttttggcctggcgtttgaacctgaacagtatcaggctctgaacccgttctggattatggttgccagcccgattttggcggcgatctataacaaaatgggcgacaagttaccgatgccgcacaaattcgcctttggtatgatgctgtgctccgcagccttcctggttctgccttggggcgccagttttgccaacgaacacggcattgtgtcagttaactggttgattctgagctacgccctgcaaagtatcggtgagctgatgatttcaggtctgggcctggcgatggttgcacaattggttccgcaacgtctgatgggcttcatcatgggttcatggttcctgaccaccgccgctgccgcactgatcgccggtaaagttgccgcgctgacagcggtgccaagcgatgtgcctgatgcccatgcttccctggctatctacagccatgtatttatgcaaatcggtatcgtcaccgccattatcgctattctgatgatgctgaccgcgccaaaactgtatcgcatgacattagatctgcaaaagaaagataaagacgcgactccggtcactgctgcataagcaacccattagtttcgttagtcaaaacgcctcgttatgaggcgttttttgttttgatgcaaaccctgtggatcacacatcaaagtcgatactcgcaaggtgacaatcagctaacggcgaacactgcagatacaggatgggcagtaccgctagcatttaatttcgtattaacttccgcgattgtgcaacgtaatcctcatattcaaccctaccggcgaaatctctacgataacaggacgaaacgatccagccgccgacgtaattgcgcgttttctttcttgagttgctcaacttgcttcagtagcgtcaaggtcatcgccacgccgtgccaatccagatccaactcattttgcaatcgacgggcgcgctggagatacattaacgcttccgcgtcaaatacccagagagaatcaccgggatctagcggaacaatcactcccagctcaaccacttctaccaattcgtcctgcaaaatgcccgttgtctggcataattcagtcagcgtataagtaatctgtacttcggccataatctgttactcccatccagtccgaggattaaatgcagcctgttcagacagttgttgccacagtgcccgtgccttctcgtccggttttggcggcataaccaccttgagaaccgcatacaaatcgccagtgccttttttgctcgccaaccccttacctttcactcgtaaccgctgaccgctctgactgccggagggaatagtcagattgattttccctgtaagagtgggaacttcaacgctggctcccagcgccgcttcccaaggtgcgagcggcaacacgatttgtaaattctgcccgtcaatatcaaacaatggatgcggagcgatacgaatgaccagatagaggtcaccattggcgccgccaccgaatcccggaacgccttgccctttcaaacgaatacgctcgccatccccaacgccggcaggaattttcaccttcagcgttttggttgagtcggttctgccaagggcatcataagttgggatttgaattgcgcgcgtctgctcggaaagcgtttcttccaagaagattggcaactccatctcaatgtcctgcccgcgcatactctgagaagattgatgggaggaataatgagcagaggcgccgcgattgccgaagaaagagtcgaagaagtcggaaaaatcatgggtatcaccgccacctgcacgaccctgccactgttgcccgccgccatgataacctgcctgctggccaaaatgaggatcgttgcgatgtaacctcagttcgtcatattcagctcgccgttcagcgtcttttaacacttcgtaagcctcggcgatttccttaaactgactttccgcatctggctcggtgctgacatctgggtgatatttccgcgctaacctgcgataagccgttttgatctctttctgcgaggccgttggctcaacgcccataatcacatagtaatctttgaattccatacggcaatatccttaagtttaatgtgccatagatataagatatccccatctaacttttataaaacaaatttatgcatatttctatccgtactcccacgcgccaatccacctgtaaactatagcgctgacctgggtttacggactcccctcaagacatttggcgggaacagcccttgttcatccgtatcaagcgctcaacagatgcctgttaatgcataaaaagaacgtcactgacatggaaaaccaccgagtaaggtgacaatctgccaggtcaattgccctttcaaccttatgttattaaatgaattacgtggtaaagtgagcgccaaaataagcgatgcaatcacaatttaagcaacggataagtcatgaatttaagaaaccggacatttcttttttggggagtgatggatctctacgcggtgttatatatcggtttacagtatttcctacaggaaagaattcctttggtagctgaagtgcagtacctgctggataccggttttgataagtatccgctgatttacacaatgattaccctatcgatcatttttaaaatatcgctggtaatgaccacagttctgtttctgactcgcagccaatatgccattaaagcggcatttattcaggagcctttacgcctactgttagttattccctctctctcgatgattacgccggttctgaaagaattcaacattaaaattcttaccgtgagcctaacgctattgctgatatctgaagtattcaaaatcgtttctttatatagagtgcaaataaagaccgagcccaataaaaccactcccttcatcgtctgattcgggggaaaacagcattttcgcgctattggcaaaacgagtcgctcagtgggagccaggccaatgccctgttatgccgcagtctgagtcatttcaccacgagtaccgccgccaggttatctcgctatttcgctaatcacttagaatcaacccaacccattgattacatgcccgtttggcgggcatgcggatgaccgtaattgactgactcatagaagatagctttacttactccgccgaccataccgctaactggtagccatccggatcgagaaattgaaagcgacgaccaccggggaaggaaaatatcggtttaaccatcacgccgccagcttcaacgactcgccgttcggtttcttccagattatcagcatacaaaatgaccaacggcccaccggctgctgtcacgaccccatctgtggtgaaaccgccagtcaggcgaccatcggtgaattcgcaataggttgggccataatcggtaaagcgccagccaaacaggttaccgtagaaattttttgagcgagtgatatctcccactataaattcaatattatcaatttgacccttcttgcctgatacagccataacacctccggagaaaaatgcacaccgcgtattttgcaaatagacgcccgctgagccagcctgtttggctggaaaaccataccattaatcctatacgtgaaatccgtaatattctcagaactgtcgcccatatcgcttatcgccgccagaacccaaagcgtgataaggaataagtaaaattcaccctatcgcaccgaagcagaaataatcctgtataagaaataaactatactgtgatcacggctgcaaaatatgtcggtagtttcagacataacataattttcagccttggcagaagaagtatggcatagaggttaaatcagcccgtgagagagagtcggtaacgggcaaggaggtatctcatggtcaatcatgtttggggacttctggtgcatcccagtcaggaaatgaaacaaatcaaaagtgaatcggaaagtattccccacttttatactcaccacgtcctgttgatggctgcaattcccgtgatctgcgcatttattggcaccaccagagtgggatggaattttggtgagggtcaggtgattaaagtctcctcgcttaccgctttctacgccgccgtaattttctatgtgatgattcttgccgccgtggctttaatggggcgagtgatttactggatggcacgccgctatgaaagtcgcccaagctggcaaagctgcaccttgttcgccggttatgccgccacaccgatgtttctgagtgggattgtggcggtttaccctttgctctggctgtgcttgttcgccgggattgtcgggctgtgttacgccggttatttgatgtacctcggcattccaaccttcctgaatatcgaccgtagcgaaggttttatcttctccagttcaacgctggccatcggtgtgctggttctggagctattactcggtttcaccgttctgttatggggttatggcgtcaggctaatctgagcaattcttataccaacaccctgcaccgtagatctcctacggcgtagggtgtatctctatttcatcttccatgttactgataatagagagattaaccttatgaatagacagcgaacattcgttattgcacttatttccccccttctctgcaattccttccctgctatgagcgctattcctatacaggatgggattactgagcaaactctgattttcgttcgtcatgcagagaaacctgaggcaggttttgggcagataaattgtcagggtttaaatcgttccctggcattacctaaagtgataaaaaataagtatggcaaacctgactttatattcgccccagatccaacgcgaaaaaaagcggatttcggccacttcttttattatctccgcccgttggcgaccattgaaccgacggctatctacttcaatatgccgataaatatccgtgtgggtcagtcagaaagtggctggcttatcaaccaattagaaaaaccaaaatattcaagcgctaaagtgcttatttcctgggcgcatcatgaaatcatggctatcactaaggcactaatgaccgaatataacggcgagcttggacaaatacccgaatgggaaaatactgattttgacagtatttacgttcttaaaatcgtgcgaagtgagggggcaaaccagattagttttacccatgaccaacaggggctgaatggattaccgcttgactgccctgaaatttccctgccgcgatctaattcattaccgggccgagttcccgacaatagctgataataataactcttttttatctcgattttttaacactggatagcaaattctctgtttttgggtcattaacagcctttgaatcatattaatgtcggtgagatcgcaatctcttacatcaccccgacaaataaggttgtacactaattgggaaaaataaaaataaggcgacgaaaatgaaaaagctgactgtaaaagaaatgaccgcaagcgaacaacgcgacgtgaaaacccaacttgatagagccaggatcaacatgggacgcgcactcaccaattcagaacaaaacaaagtgaaagacgaagccatcgaaaaaatcatgcaagcccgagcactggtcgccaaagccaaccgccctgagaaaaaaaccaaaaaaacggcaccgagcaccaccacctttagctggtcctcttccatcagcagccgtccaccacgttgagtctttcccccgtcaggtttttgcctgactgggcacccaatttctagtagcggaggtcatcctccgtcactatcggattgttatgattcctgccgttaaatatgttaattcaatagctgattttccctcacgactgtcctagtatggctaatgctgtattccgttagtccgccccgtgcactattaaggagtttgttgatgaaactgttttataaacctggcgcttgttccctctcaccacatatcgtcctgcgtgagaccgggctagatttcagcgttgaacgcgttgatttggcaaccaaaaaaactgaaagcggcaaagacttcttaaccatcaaccccaaaggacaggttcctgcactggtgttggatgatggcagcctgttaaccgaaggcgtcgccattgtgcagtatctggccgatcaggtgccatcgcgcaatctgatcgcccccgcaggcacccttgcccgctatcatgctattgaatggctaaactatattgccaccgaattgcacaaaggattcagcccactcttcaacccgaaaacgccggacgagtacaaaaccatcgcccgcgagcgtttagacaaacaatttgcttatgtcgatagcgtgctggcgaagcatcatttcctgctgggtgataaattcagcgtagcggatgcctatctgttcactattctgggttgggcaaaagccatgcagttcgatctgccgcagtataaaaatctgacggcctatatcgcccggattgcggcacgcccagcggtagacggcgctctggttgcggaaggtctgaagtaagaaacgtaaagaaagaatgatatcccccggcaatggcagacttgcgcttttgaccgggggaaaatgattagagttttactgccgtaaactgatgaaccggattgacgataagatcctgtgcagccacgatttgtaattcatactcgcccatttgctgggtagtcagcatcacttcataaactgcggcggtgacgtgctccagcgctttatctaacgcttcgccttttagcaaattcaccaacagtaggccgctggttaaatcaccgacgcccaccggctgacggctgccgaaatccaccaacggacggctgatatgccaggcatcttccgctgttaccagtagcatttcaaagctgttcaggtcataacccgcgcggctaagatgcttaaccagcaccactttcggccctttagcgcacaggccgcgagctaccgtcacggcttgctcgacgttttccactcgcgttccgctcagctcttctaactcaagcaagttcggcgcgataatatcgctggccggtaatgcctgcttacagaagaattccgccacgcccggcgcgacgatgcagcctttttccggatggcccatgaccggatcgcagaaataccacgcctgcggattggcttccttcacgcgtttcaccgcagccaaaatatggccgccctgctccggcgagccaatatagccgctcagcaccgcatcacagtctttcaaacggtcaacatcggcaatgccctgcacaatttcagtcaaatggctggctggcatcacgcagccagtccaatgaccatactgagtgtgattggagaattgaacggtgttcaacggccagacattaacgcccatgcggcgcataggaaattccgcagcgctattgcctgcatgaccaaaaacaacgtgggattgaatggaaagtatatttttcatcggtacggcctaaagttaggggctgctcggccctttcagtaacaccattatcactgcgtgtttgcccgcagttaatcgttgaccataaaaaacaagggacaccaggccccttgttttcgcaccgatttagatccagctcaccaggcagtaatgttttttgccccggcgcagtaaggtaaagcggccaaacagacgatccgcatcgctaaaggtgtattccgggttcgcctgtttctcgccgttaatggtcacggcattggaaccaatcagggtacgcgcctgaccgcgggacggagccaattccgcattcaccagtgcctgttgcagatcggcatcgcgggttaactcaatcgccggcataccgtcttgggccagttgggcaaagtcggcttcggtcatgtcgttcagattgccggagaataggctggccgtaatacgttttgccgccgccagaccttcagcaccgtgaaccataccggtcacttcttcagccagcacgtactgagcgcgcggcgctttgccgctgtttttatcttcttcttccagcgcattgatctcttccagactcataaaggtgaagaatttcaggaagcgatacacatccgcatcggcggtgttaatccagaactggtagaacttgtacgggctggtttttttcgggtctaaccataccgcgccaccttcggttttaccgaatttggtgccgtcagctttggtaatcaatggcacagtcaggccgtacacttgctgctgatgcagacgacgagttaaatctatcccggaggtaatattgccccactgatcggaaccgccgatttgcagaaccacattatgctctttattcaggcaggcgaaatcatagccttgcaacagattgtaagagaattcagtgaaggaaataccgctatcatcgcgatttagacgttgttttaccgcttctttgttaatcatttggttaacagagaagtgtttaccgatatcacgcaggaaagtcagcacattcatgccgccgaaccaatcgtaattgttggcggtaatcgcgctgttctcgccgcagttgaaatccaggaacggggaaacctgatgacggattttctcgacccattcattaacggtatccgcggtgttcagcttacgttccgtggctttgaagctaggatcgccgatcaagccggtcgccccacccaccagcgccaccgggcggtgaccctgtaactgaaaacgcttcaggcacaacaacggaaccaaatgacccaaatgcaagctgtctgcggtaggatcgaaaccgcaatacagtgaaattggcccttgcgccagtctctctgctaacgcgtcttcatccgtaacctgggcaacgaggccccgctcttgcaattgtttaatcaggttgctgctagtcattaacgactccattgtcttatgcaatatatttatctggttaacgtttaacgggaacacttgccatcgggaaatgttgtcgtttatcggcgtaatgcctgcgtgccagatggcaccccatcaggatgcgttcaaggaagggtatagaataaagcgcccgccccgcgagcgctaggtttaacctcaatatttcatcgttctcagggggctaaacggtcaattttccacgtatcggcgtctcgttggtagagaaaacggtcatgcaggcgatgttcgcctccctgccagaactcaaccgagtcgaaacgaacgcggaatccgccccagaaactcggcaccggtacctctccctgctggaatttttgtttcaactccaaaaatttgctttccagcacgccgcgcgcggaaatccgcgaggattgctgagaaacccaggcacctatctggctatctttaggacggctgttgaaatatttaagtacttcgaaggtcgacaaacgttcggctttgccgaggaaaatcacctggcgatccagcgtatgccaagggaatagcaggcttatatgggggttttcagccaattgctgagcctttcggctgcctaggttggtgtaaaacaccatgccttcgtcatcgaaatgctttagtaatacaatacgttgaaaaggttgaccattggcatcaacggtcgccacgcacatcgccgtcgggtctgcgagacgcgcttcacaggcttgtttcagccagcgctcaaataaatccagcgggttagcagtcaggtccttgcggcgcagaccgccacgggtatattcacgtcgtaggtctgcaacatcaaactcattattttcagtcatatacactctgtaacgcgctgaaactcagtggattattattgtgcctctgtgacgccaagatctcaatcgccctgacgtcactgcctgtttctagtagtcaatcacttcgagggcacgagcacgcaatcattcatcacgattttatcgccccgctcgataaaggcgctgtcacctttcgaccagaacgtataataaccgtcactgtatcgggtgcccgaagcagcaactacctgcggcagattcagttgcttgccatccatcacaaacctaactttgtcctgcttattatccagcgctaccgtcaactgggtacccccgcattgatagtgcaaagtttcacttttctgtgaaaactggctacatccagccaaagtcagtacggcaatcgccgtgaaaacggatttcattgccttatctcctgtcatgagcttctcccgcagcctatcacccgtaggctggacttaccgaatatattgaattgcagaataaattgaatcacctaatatcctaaaagcgtcgccttatcgccctggctgtatgaccgggtaaatcgcgcccaaaacggtttcacagctggctccggtaaccgacggtaaattgcccggcaggcctgaaagcgtgcgaaatgctagccaggcaaaagccagggcttccatatcgtcgccactgacgccaaagctgtcggtggtcgcgacttcagtgcccggcaacatcgtcgacattcgcgccatcaatagtggattccgcgcaccgccgccgcacaccagcaaacgctcgcaacctcccgccagttgaacctgttcggcaatggtcaccgccgtcagctctgccagcgtcgcctgcacgtcttcaggcgctattcgcggcataatcttcagctgctgttccagccaggcggcgttgaaatactcccgcccagtgcttttcggcgcaggtttggcaaagtaaggatcggacaacatttgcttcaatagcggctgattgaccttaccgctcaacgcccattcggcatcgcggtcgtaaggcaacgagcgatgacgccaaatccacgcgtccatcaacatatttccggggccggtatcaaaacctctgaccggagaatcagggatcagcatggataaattagcgataccgccaatattcagcaccatccgccgttcggcattatgcgccagcaatgcgtggtggaaagctggcaccagtggcgccccttggccgccataggccatatcccgtcgccgaaaatccccgacggtagtaatctgcgttatcgccgcaatgcgattattgtcccctaactgcagagtaaaacctggctctcccatcggttcatgccagacagtttgcccgtgacaaccaattgcggtgatgtcctgcggcgacacgccggtttttttcatcagcgccagcaccgcttcggcaaacagcgtgcccaactgcgcatctagcctgcccaccgccgataaggtggtttcttgcccctgacacatcgccagaatatcttttttcaactgaagcggtatcgggtggctataagtggcctgctgcgccaccattcgctcattgatcgcagccagaaccacatcgattccatccaggctggtacccgacatcaccccaataaagcggcctgatttcatagcaatgaccttatctcccgctgcgggagtacaatgacaaaaaaaaaacaacaacccccaatgaggttactaaaccagaataataaaattaacaccatgaaaagatgtagtttttagagtgtatcccgcgctgtcttcccctatataatgcaaggctggttttgccaggcagctcacagaaaatggatgatttttttctttttcatttcctgcttttagaaatttaaaccaccgtttaatattgattaagggaatacacgttaggctagcgatcaactaaccgacaatgtgcttcaatacagtgtggtgcgataactacaatgtgatgcaataactgttggggtcagccatacttttatctatacccgaaattaattggtttcgcgtataggtagacaggacatagtgaaccgaatatcggttatgcactttaaactaggagtttttatgattaagcctttcctcgtcattgctatcgctgcggttactctgaccggttgtgcgaacaacagcacgctgtctggtgatgtattcagcgcgtcacaggccaagcaagtgcaaaccgtaacctacggtacattggtttctgttcgcccggtaaccattcaaggcggtgacggcgacaacgtaattggcgctatcggtggtgctgtgctgggtggtttcctgggtaacaccgttggcggtggtaccggtcgtagtctggcaaccgcagcgggtgccgtagccggtggcgttgctggtcagggcgtacagggcgcgatgaaccgtaccgatggcgtgcaactggaagtacgtaaagacgacggcaccactattctggtggttcagaaacaaggcccgactcgcttcagcgttggccagcgtgtgatgctggcaagcagcggcagcaccgtgaccgtcagcccacgttaagtttggcgcggacataaaaaaaccggggatcacattgatccccggttgttttcttttgctgtgaatagattatttgaactttattatttttacttactgtgtaattgattaatattttgttcaagtttcattagcacacctgttaacaaaataacctccgcatccgtgatattcgacatgacttcgcctcgggttgtttcaatgacgtgttcgagttttttgatggtcgaacacgactcttccgttaatttaatccgcttagcgcggcggtcgttagcacaagtctgccgtgtgattaatcccttatcctccagttggtccaaagtccgaaccaacgatggctgctcgataccaatcgcttttgccagttgaatctgcgattgctccggtggtaaacgactaatgttatggagcgtaacccagtgtgtttgggtcagttccaacggttttaatcgatgatcgattaaagcgcgccaaacgcgaactaatcgtgctaaatcagatcctaatgtcgattccaattgcccctccttttaattagcgtgctagcataactcccagagtccagtctattttgggtaattaacattaaaaatacaaatgtatatataccgccgatgcagtgttaatagcaataaatacgagaaatcctttagaaaaggtgaagatttctttaattctaaccccaaaggattaacccaatgcaagtaactcctgtaccaatggcatcacccttaacggactgggtactgggtgcctcgatctatttcccgcctctcttcaaggcggttatgctaggtttgatattttggctattgatccatcatttactacggaattggatctactctggcgagatctggcatccaatgttaatggatttgtctatttttgtcattgccgtcagcatttctttgtggattttagtcagttggtaaattgagatgaaatatcaatcgataaaatatttttccagcgtgatcgtttttgctatcgctatgttcgccggtgggtggatgtggaattattatatgcaatccccttggacgcgagacggaaaagtccgcgcagaattagtcaacatcactccagaagtgtccggcaggcttattcaaattgcgatacacgacaaccaattagtaaaatccggtagtctgttattcgagctagacccgatgccgttccaactggcgttggataacgcgcaggccgcattggataaagcgcagtccgatatggataaggccaatcatgaattggctcgacgtcaaaatttacctaaaaacctcatatcaggcgaagacctggatattgccaatttaaccgctcaagcaatgaaagcggcatatcagggcgcgctggctaatctggaacaggctaaatggaacctgagtaaaacccatattcatgcaccgactgagggatatataaccaatttacaaacgcgcatcggaaattatgctaccgcggggactccattagtggctttggttgatattcattccttttacgtaatgggttatttcgaagaaaccaaattacgacatatcaaagaaggcaaccgggcaaatattgttttatataatggaaatataccccttcagggtgtagtagaaagtatcgggcgcgccatttacgatcaaagtgtcgatacaaatagcgacttgctcgtcgatgttaagccgaatgtcccctgggttcgtctggcacagcgcgtgccggtacgtatcaaactgatcgatgttccgccggacgtaaccttagtggccggcaccacctgcaccatttctctggctgactgacaaaaatgcactggctaccgctgcagtggaaacgcacgccctgggggaaggccagcggggcgcagtggcgctatgccttgcgtaattcgctggcgatgtgcttgtcactgtgggttgcttttactctcaatctggatgagccttattgggcgatgacttccgcggcggttgtgagtttccccaccgtcggcggtgtaatcagcaaaagtattggtcgggtgattggtagtctgatgggtgccgctgcctcggttattattgcaggtcactgcctgaatgatccttggctgtttaccttcgctattgccgcctggatcggctggtgtactttcgtatccaaccattatcaaaataacgtttcctacgcctttgctctggccggttataccgcagcaatcatcgctttttcaacggtcaacactacggatactcaacaaattttcgatatcgctcaggcgcgagtctgcgaagtgattaccggtattttgtgcggtggcctgatgatgatgctgttgcccagcacctcagacggcgaagcgctgctgacctcgctgcggcgtatgcattcccgcctgctggaacacgccatgctgctgtggcagaccgaagacgatccgcagattcgtacctcacacgagggcgtgatcgggcagattctgacgctcaatctgttgcgcattcaggctttctggagccactaccgcttccggcgacaaaacaatacgctcaattttatgctgcataatcaattacgaaccaccagcgtcatcgccagtctgcgacgtatgttgctcaactggcccaatccgcctggcaatctgaaaaaggttttgcaaacgctgattaccgagcttcagcagccagattgcgataaatatcgagccgccaaaattttgcaacaaattatcccgcgagataaagatgattaccgccaccgcgcattctggctgcgtttacgtcatttctgttggttgtatctggaatctggccattggttacgccaattggaacaacacagtgaacgaactacattgcccctccccaaggttgccacgctggcgcgccacaccgatacctacgaagcggcttacaacgggttacgcacctttgtctgtatcgttattggctgcgcattctggataaacacccaatggagtgcaggcagttcggcgctggctttggccgccgtcagttgcgtactgtattccgccagcccgtccccgacggacagcatcataacgttgctgaaagccatcgtgttgttatccatcggctgctttattttaaaattcggcgtcatgattcgaatcgacgacttttggttgtttgctgccgtactcttaccgatcctggttaccatgcagatgtttaagcagcaaaatccgccctacgcggcgctgtgggggcagcttatcgtttttatgggttctttcctcagtgtgaccaatccgcccagctacgactatcagggcttccttaatgacaacctcggcaagttggtgggcgtgatgctggcgggcgtggctttccagattttgcgccccagttcggataaacgaaaaggccaacgaattattcgcgccctgcggcgagactttatcgaccagctcagcccttatccgcaacaaagtcagccacgatttgaatcgctgatttatcatcgcatcagccagttaaatctcagtcaggatcaggaagcgcgcatctggctgttacgatggggcatggtctatctgaattgcagtcatgtggtatggcagttacgggactggcaaaccactgcgccgccgctgtctgcggtgcgggatttgtgtattcattgtctgaaaggcagcgtaacggaaaaaggcgttgagcctgaagcgttagcggcaacgctgcaagagctactgcgcatcagcgaaactctggctcatcatccggactcgtcggggcgagaactggcggggctggtttggcgtctgtactgctcgctgacgcaactgcagctcgccctcaccccgccggctatttcttcccctgcctaaggattagtcaggggagatcaatcatcaaggaacgtcataacccaaagcggcgcggcgaatgcggaaccactgctgacggctgagcgttagggatatcgatttccacgcggcggcaacgcgctcaatcttgcctgaaccaataatcggcagcggcacagagggcaaacgcatcacccaggcatagaccacttgctcgatattctccgcaccgatttcttccgccacggcctgtaattcatcacgtaatggctggaactccccatcgttaaacaaacgcccaccgcctaaacatgaccaagccatcggtttaatacgcaattgctgacacatatccagcgtgccgtccagaatggtaggctgatgcaacggcgatatttccacctgattggtcactagcgagaaaggcaggcgagattgcagcagactgaactgagccggtgtgaagttagatacgccaaaatgcttcactttgccgcttttgtgcaactgagtgaaagcctcggcaacgtcgtcagcctccatcagtggatcagggcggtgaatcaacagcagatccaaataatccgtgtgtaaatgagtcaatgattgctcggcgctgcggataatatgatcgccatcggtattgtagtgacccaaggcgtgctctggcttagccgtcgtcgcgatgccgcatttgctgacgatttccatcttatctcgtagtgatggttgtaaacgcatcgcttgtccaaaagcctgctcgcactggtagccaccgtagatatccgcgtgatccaccgtggtaatccccatatccagatgctgctgaataaaaccctgtagctgggcgggcgtcatgttccattcgatcaaacgccagtaaccgcaaatcatgcgggaaaattcagggccttgcggcgataattggctacgtgtatgcattttgaccacctatatatgttgaatgaccttcagcatacacaagcgacagaaaggatcatcatcctgacgcaaggaaatggcggttgatcggtatcaaaagatgaatttaaaataatgacggttgttccggtagcggttcttccggttttttgttggcacgtagctgacgcaacaaacgttgacgacacaggcgcagaacgtcgtgtttttgcatgtcggtcatttgcatccagccaaagcgctcttcccggctgcggaaacagccacggcaaaaaccacggtcatctgcttgacagataccgcgacaaggactgggaatatcaaaaaactcaagctgctgagccacacaacctcctcggattaccctttcattgaagacggcttaacggcggctggcaagtacagattcgcgatgtcgctgaaaataatcccgcagataacgtatcacctgacgatttttttccggcatcgccctttccagcgtcaacgcatgtaaccgcagcggcgttgattgccactccggtagcagcgtgattaattctccgcgttgcagctcatcaccaatttcatacaaaggcagcacggaaagccccatcccttcgcgagtaaaatcgcggataaccggcatactaccgctaataacctgcccgtgattcagacgcaaaaccatcgtttctcccgatgtgtgatgcaaatctaaatgaatagccgagggattattcaccgaggacatccagcggtgcgccagtaagtcctgcggcgtttctggcacaccgtgctgactgagatagcgcggtgcagcgcaaatcaccatcggccactccgccaacggatgggcaatcatattggcgtccgccagctgtcgattgactcgcagagcgatatcaacccgctgttcgatcaaatccaccacttcgtcattggccagaatccgcagggttaatttgggatgagcgtttagcaaaggggacaacgcttccgccagcgggcgaccaccgatacctacggtagtggcaatgcgaatttcgcccaccagcgtatctcgtagctccgccaaccgctgctcggcctctttcgcctgctgcaacatggcttcgcagccgggataaaaaacctgcccggcttccgttaacgtcagcctgcgggttgagcgatgcaacaaggggacgccgagcgctttctctaaagagcgcatatgctgactaatagcggatgcggtcatacccaaccgtcgccccgctgcggttagcgaaccttcggccactacggtggcaaaaatcgccattcggttgagtttatccatgattatgaagttttacttaaagaagaaagcacaaatatggcacttatcagccagtttgttaagtattagagttagccccgtcaacccaacttgaggaattaaacgatgaaactggcaattattggtgcaactggttttgtaggccgtaaagtcatcgacgaagctctggctcgcggtcatcaggttacggcgattgcccgtcagcctaaagatttacctaaaactgataacctgaccatcgcattaggtgacattgctgatactgactggttagcccaacaattgagcggtcaggatgcggttatcagcgcttataaccctggttggaccgaagaaaatcagtttgaaaaattcacggcgggaagccagaaaattctggatgcgcagcaaaaagccggcgtgaaacgcctgttggtggtcggcggcgcgggcagtctggaagtcgcccctggcgtggagttagtcgatacgccagacttcccggatgcctacaagcaaggcgccttgggcgcccgtgcgttacgtaacaagttacgcgctgaaaacacgctggattggacctacctgtcaccggcggccttgctggaaccaggaaaacgcaccggccagttccgtttgggtaccacttcgttgctgatgaacggcacggcgccagccagcatctccgtggaagatttagcggtggctattttagacgaaatcgaaaatccgcagtttattaaagcgcagtttaccgccgcatactaaggacgaacccgttctgcatcagcctcgcgcatggcagtcaaacctaccctcataggtgtgccgtgcgcggggcttttcttctttccgcttgtgtcacgtctttccgcttttgtcacgttttgtttccaaacgctaaggttatcttaagtttgctactgtatcgtgccaatcattaatgaataattggttctgattagcaatgaatggacgattcaagttacagtgtaacgcaatcacctttatcttaagctgcgcgctatttttcacgctgtttctcaatgctctttttatacacaaagcctggtcgctgatcgccttcggcagcctagatagttatgtgttcgccgccacgattccgctggtgatattctgcgcgttgaatattactttcagcctgctgtgcgtgccatatctgcggaagccaatcattatcacactgctgctgggcagcgcggctgctaactattttatgtttagctatggcgtggtgatcgacggcaatatgatgcaaaacgcctttgaaaccaatgcgcaagaggcaaccgccctgctcacgccacgcatgggctggtggttgctggggctgggcatattgcccgccgtcgtcatttgtttcacccggattgagtccaccaagccttggtggtacatgctgggtctgcgggcggccaatattctgttatccatgatgattattctgctgatcgccgcgttattctataaggactacgcttcgctgattcgcaataacaaaagcatcgttaaaatgctcacgccgtccaactacgttagcggtgtgattgagtatgccaaacacaaatatttcaccaataacctgccactcattcgtatcggtgaagacgcgcataaaggcccgcagattttggcgcaacagaaaaaaacgctgatgatactggtggtcggcgaaactgcgcgcgcagagaacttctccctcggcggttacgaacgggaaaccaatccgcgtctgaagcaggatcaggtgatttattttaaaaacaccgcgtcctgcggcaccgaaaccgccgtgtccgtcccctgcatgttttctaatatgccccgtaaagaatacgatgcgaccctcgccagccatcaggagggtttactggacattgtggcgctcgccggggtgaatgtgctgtggcgggaaaacgacggcggctgtaaaggtgcctgcgatcgcgttcctcatcaggatgtgacgcagttaaatctgacacagtactgcgaaggtgatgtttgtatggatgacgcactgctgcataatctagacaattatatcaatgggttaaaaggcgacagtgtaattgttttacatcaaatggggagccacggcccagcctattatcgccgtaccacgccggaatttcgcaaattcacgccaacctgcgatagcaatcagattcaggattgcagcccgcaagagctggtaaatacctatgataattccttgctgtataccgatgcgacgctggataaaaccatcaaaattttgcagcaacacagtgatacatttaatacggcaatggtttatctgtccgatcacggggaatctttgggtgaaaacggcatgtatctgcacggaacgccctacctgtttgccccaagccaacaaacgcacgtgcctatgttgctgtggatgtcagcggattatgaaaagaatttcgccatcaatcgcaactgtttaaaccaaatggcgcagcaggctgaggtttctcaggataatctgttccataccattttagggatgatgaatattcagaccaaagaatatcagccttcattggatatactgcactcttgccgctcacctgcctgatggaaagagattaacgcttaaaatgatgaccgctgatgttcgccatcggcggttttatctgaatagcgggacaaagaccttttatcaaacctatgaatgataaggtgattatttaaaatcaccttatttacagcctcgaaaagctctcggtgtatctttttttcttgacctagaccagtcggtctattacgctaatggtcatgaacaagatattgcactctcaaactgatacccgcgaacatctgttagccaccggcgagcacctgagcttacgtctgggctttaacgggatgggactcagcctgctgctgactaccgctggcgtaccaaaaggttcgttctatcattactttaagtcgaaagaagctttcggcgaagccatgctgcaacgctattttgatcgctacgatactcaaatgcataacctgttttccaatccgcaaggggatcagcgccagcaccttctgggctattttgctcagggaattggcaatttttgcaacagtgagtgccacaacgcctgtctggcggtcaaactttctgctgaagtgagcgatttatctgagcctatgcgccacgcactggataccggcaccgctcgggtcatccgtcgcttacaggacgcgattgaaaaaggcattgaggagaaatccctgcgggtggttttatccgcatccgccacggcagaaacgctctatgccctatggctcggcgcctcgctgcgcgccaaagtgaaacgctccgtcgccccactgacctgtgcgttagaaagtatcgaattgctattacaaccgacagcctgatttaacagccactcatctcgcctgcgaggtaagtgtcttacacaaacactagacgactggtctattattacaggaattatcatgaagacagcaaaattgttctctccgctaaaagttggcgctgtgacgctgccaaatcgcgtgtttatggcaccgctgacccgtttacgcagcatggaaccgggtgatgttcctacgccgttaatggcggaatactacgctcagcgtgccagcgccggcctgattattaccgaagcgacgcaggtgtctttccaggccaaaggctatgcgggcgcaccgggtctgcatactcaggaacaaatggaagcgtggaaagagattactcaggcggtgcatgataaaaagggtcatatcgcggtacaactgtggcacgtaggccgcatttcacacagtagcctgcaaccgaatcaacaggcaccggtcgccccttcggctatcgctgcggattctcgtaccacggtgcgggatgaaaacggtgcttgggtgcgcgttccttgctcaaccccgcgcgcgctagccttagaagaaattccaggtattgtggatgatttccgtaaaaccaccgccaatgctcgcgaagctggcttcgatttcatcgaaatccacgctgctcacggttatttgctgcatcaatttatgtctccggcgtccaaccaacgtaccgatgcctacggcggcagcattgaaaatcgcactcgcctaacactggaagtggtagatgcaaccgccgctgaatggggcgcggagcatattggcatccgcatttcaccgctcggcccattcaatggtctggataacggggaagatcaggaagaagccgcgctgtatctgatcgatgaactgaacaaacgtaaaattgcctacctgcacatttccgaacctgactgggcggggggtaagccttattcagacgccttccgcgacgccgtgcgcgctcgtttcaacggcgttattgtaggcgctggcgcttacagcgctgaaaaagctgaagcgttgatcgaaaaaggctttattgacgccgttgcctttggccgcagttatattgccaacccggatctggtacaacgtttgcagcagcaagcgcccttgaatacgccggacggtgacactttctatggcggcggcgctaaaggttacaccgattatccaaccctataatgccgcgatttagctaaacatcttaatgccggtgagcgtttctcttaccggcattgctgtatttaaccgccatttgcgatttcctctcgagcagcacactcatcgatttacgccgcgaacgctgcgccccaatgttagagtgtagagaaatttgccagcgctgtgcggtattcgcctgactgggcttatcggggtatctgtggcgttcaggtgacgagtatcgcgcaacagcccatggaagaagctctgtcgcaacacatagtattggtgtttggttcaaagagtattcagagtcgcgacggaggtatccccagccagattgcagagtggatgaatcaccgtcgtaacaattaaacgccctgcatgacggtatgcccatccctttcccgacccgtggagtcagctgctgggaaagtcatgggcaaagacgacgctgaccgtctgatggggcgcttagcgccctttcttcttgcgaccgggctgggcaaaacgcttgcgggaagcggtgttatccgcgggtttttcgacgcttttcgggcggttaacgctcggttttttcgcggcagcaggcttggcctgcgcttttttttgccggtttctcgtcagaggaggaattttcaatcagcttgaataattcaatcaactcatcgtcggtcaaatctcgccactcgccctgcggcaaccctttcagattgacgttcatgatgcgagtacgctcaagtttggtgacttcatagccaaaatgcttacacatacggcgaatctggcggttaagcccctgcaccagcgtaatacggaacacaaaaggcgcttcttttttcactttgcactttttggttaccgttcccaacatcggcacgccggcagctaaaccaagaataaattcgtcagtcaccggtttgttaacggtcactacgtattctttttcgtgatcgttccccgcccgcaggattttattgaccaaatcgccgtgattcgtcaggaaaatcaacccttgggaatctttatccagccgaccgatagggaaaacgcgtttgctgtgattcacaaaatcaacaatattgtcgtgctcgccgtcttccgtagtacaaataatgccaaccggtttgttgagtgcgatcagtaccaaatcatcttcattacgcggctcaatcagctgaccgttaactttcaccacatccccgacataaacctgatcgccaactgaggctctcttgccgttaataaaaacatttccctgttcgacgtaacgatcggcgtcgcgacgagaacagatgccgctctcgctaatgtatttgttaagacgaatggatgagttggtcagcatagttcttccgaaaagggcggactataccttatccgcgccgggttgcgaagcctgtaaagcccgataatttaaatggtgcaggccccgtcaagtagtgcggtgccataagaattgtcgatagtacataaccaacgtccgtccggttcatggcgaaaaacgtaagtcgcttatcgggacgctgtcaccgatcctccctgtccgtcaggaaaatgcaacaccgtttcgatcatcaccaatgcatcgcccgatcctgcaataacctgcatttcgccctgctcaaccaccagccgatcctgaaaataatcggaaatagcaataaaagcccgacgaatattgtccgttcctctggcaatcatgccgggtttcgccaccagcgccgtatcttccgcatagtgctgcatcagtgcgtcaaaatctcggttagaaatcgccttatcgcaggtttcgatgattaagcgtatgggatgcgtggtcacggatttcgtccttataaagataaaggctgagcattcccttaccttggcacccttccggcatcatagctccctcaactacccgcctgcaggacagcaacatcgcctgaacgcaaaaatactgattacagcgtaggcaaaagaaatatcggctgccccaccagggtagtgagcaggaagatattgctatatcattgatgactaagtttgattcatgatcacttattattaattaattgataaaagaggtatttctatgcgcttacttcataccatgatccgcgtcggtgatttgcaacgttccatcgatttctacaccaaggtattagggatgcgcttactgcgtaccagtgaaaatactgaatataaatactcgttggctttcgttggctacagcgatgaaagccaaggttcagtcattgaactgacctataactggggcgtagacagctacgaaatgggcaccgcattcggtcatttggcgctgggcgtagacgacgtagcggccacctgtgagcaaatccgtcaggccggtggcaaagttacccgtgaagccggcccggtaaaaggcggcaacaccgttatagccttcgttgaagatcccgatggctataaaatcgagctgatcgaaaataaaagcgccggtcagggtttaggcaattaatcgagctgccccgtgctaaaagcgcccgaaagcaatttcgggccgttgacgtgcaatagccgcgaataggaaatagaaggtcactggcgttaaatctgatgagagttcccgctcgcacgttcatacttgcagctaacgcctttacttccctgattttagagcaggttttgatcgcgatccggcttcaaccttggcgtctccccctcttctgatgattcctcctgcatcgcgcggaaaagtttgacataatgcgcgcaatattcgaatgaagataagaaactaatggcagaaaaaagtgatgttaacgccctgagtggccgttttcgtgggtattacccggtagtaatcgacgtcgaaaccgccggatttaatgccaaaaccgacgcattgttagaaattgctgcggtaaccttacaaatggatcaggacggttggctaaagcgggatgaaactctgcatttccacgttgaaccttttgaaggcgctaatttgcagcctgaagcgctggcgtttaacggcatcgacccaaccaatccgctgcgcggcgccgtgcgggaatatgatgcattacacgccatttttaaagccgtgcgcaaagggctgaaagatcatggctgtaatcgcgctatcatcgtggctcacaatgccaatttcgatcatagctttgtgatggaagccgccgagcgtgccaaactgaaacgcaaccctttccacccttttgccacctttgataccgccgccctcagcggtttagtattagggcaaaccgtgttggctaaagcctgcctgactgcgggaattccctttgatagctcacaggcgcattccgcactgtatgacacagaacaaaccgcagaactcttctgcgaattggttaaccgctggaaacgcttaggcggctggccgctggctatcgctgacgaatcttgagtacaacggctccttccccgagacgaacgcccgactaaccgtcaactgcctctttaaacgaggcagttttgcgcggattgattcaatatcaaacgctcatcgctttaatcaattcgagccaaattctcttcgcttttttgtttgctatgacttgtccagatgactcaatagattatctctattacattcagtatccataaaaaattttaattttttctactcactttatatccgctactagaaatattttatttaatctattaaatatcgctttaaaataaataaaactcacatatggaataacaaaaaaatatcaaattagaactcataaattagatcaaaaaatgatggaaataagaaaagaattaaaagtcaccaccacaacatcacaaacaaagatccctcctagacaacaaaataatagcgtgataattttggcgggatattattcattaagatagcaggatgttattcatataagttaatacaatacatcacacagatagcattcttgatatcaactaaaacagctccaacgccaataaagcgcagtacagtgaactcaagccggttacaactacagcgcagatgcaccacaacctgtggaactccgtagtcttacggtcataaacgtttcttcacgaggaggcatacgtaagcaggatatatgctgggaaatagtgataattaatcaatgaataaatctgtggaaatcatactggcaataccaaaacaataatcaattggcgcagagaatagtaaaaacacgattacctcagcgtgactcaatatcttgaagaaacattaaccaatagaattcacctctaccgggtgatttttatttccctgatacgacacagttaatctatttaatggatcatttaattctatggataaaaaacatattaaaaatcagattttctcatgcaatgagacaacggcaataatccactcccctttagctaaaatatcggcgtttattattcttacctgcggcgtttctggcagcacctccgttctggccgaatacgcggaattggttagcggtgatcaggttgttagaacaggagatgttattgattcaggcgatcggcaagcagtggaaaatggcggtaaaagccaagacgcgacaataaatcaacggggcgtacaaattgttcgcaaacacggtacaacatatggaacgactataaataaggatggagtccagagcctgtatggcaatggaatcgccgacttcaccaccattaatcccggtggagaacaagagattgggttcagaggtctggctaaaaaaaccaaaataaacggcggcacacaaacaatccatgatgcgggattttccgcatatgcggtgatcgagcaagatggaacgcagtctatccaaaatgaagggttagcctacggtacgaccattgaaagcggaaatcagcatgtggcaaaaggaggtacagccgctcacagcacggtaaaaggccgcggcagactgaacgtaagcgccggtggccggcttacgggtaaaacactcatccttgaacagggaacgttaaactttacagccgaaagctcagaggatgttttacgcaatgacgggcaactgatatttcaacgcgatgattacactctggattttggcttaggcgggagcggctccagcgctgtggtacaaaatagtcccggcaacacattaaccctgacccaaccgagccactacttctcggaaacaataatcaagcaaggtaccgttaaagccgcagaaaaacatgtactcagcccaaactctcagtttgcaatccattctaatgcgactctggacttaggcggttttgatcaaaagcttatcgccctaaataataacgggacagtcaatttcggccattcagataaaagggggacgacattaatcgtcaccggtgactacagcagtcactttggtctgttgcacatgaacgcgacgttggcaggcgacagctcccttggcgataagcttattgtggaaggtaatacgtcaggccatacgtacgtacaggtgaacaatctgggcggcagtggcgcaaaaacgcttaatggcattgagttaattactgtagcgggcatgtctgacggtgtatttgttaaaaacagccgtattgtggcaggcagttatgaatatgacttacacagaggttcgggggataaccaatcgaattggtatctcagtagcaacatgactgatgaccatacgataggagtcgacgacgtcgaagctgaagaaagtagcctcgataccccgctggcccccattcccacactcaccgatgacgatgagctaatcgatgacaatgagctaacggacgaagagccagaaacaagcagcccagacaccccgcacgttgtcgatcctgaaataagtgtctctgaaataaatgataatgatattgacgcattacctatcacagatccggaaataaacaatcccaataccactcccgtgtcagagatacccagcattcccgccgggtctgatgcagatcctgatgtggatacgaatgtcatgaccttacgcccggaagccgcagcctacggcgccaatctgtctgcagcgaataatctgtttataacgagtctgaatgaccgtttaggcgaaacacactacacagacgtacatacgggagaacggagagccaccagcatgtggctgcgtaatgaaggcggacaccaacgcacccgcgaatcgcaggggcaactgagcagcctgactaatcgctatgttgtgcaactgggaggcgatattgcccaatggagtgataatgcctgggggcatttccggttggggattatggctggttacggcaacagcaaaagtaaaaccgaatcccgagtctccggttataacgctcgttcctccatcgacggctatagcaccggtttatacagcacttggtatgccaacagcgaagaaaaaagcggtttgtatttagacagttgggtccaatatagctggtttaacaacagtattagcgggcaggaactggcaaccgaaaggtacaaatccaaaggtctgaccgcatcagtggaaagcggttataccttcaagctcgcgggaaacatggccagaaatgccgcgtactttattcagcccaaagcacaaatgatctggatgggcgtcaaagccgatgaacacaaagaggaaaacggcagctatatatccggtgtcggtcaggggaacatccaaacccgtctgggggtgaaagcctttatgaacggctacagcgatttggataaaggtaacaataggattttccaaccttttatcgaagccacctggctccacaataccaaaagcttcggtacgaccttggatagcatgacggtacaacagagtggaacagccaatattggcgagctgaaattgggcgttgaaggtcacatcagtgaaaagcttggcctgtgggggaatgttggccagcagataggtggacagggatatagcgataccgccgtcattttaggcgtcaaatatcaattttgatccatgagtcactcatcaacattctggtaatcaaaccaatatcggttgttcagtatagaactctctaatcagcggcaataaaaatgggtggccttggccacccattttttacgttctaacttatcagataatcgcgcgcttattcagccgcctgatcttcctgtgaacggtatttgtcagcggtttcttttaataattgctgcaattcgccacgttgatacatttcgatcataatgtcgcagccgccgattaactcaccgtcgatccacagctgtgggaaagttggccagttagcgtattttggcatttcagcgcgaatatccgggttttgcaggatatccacataggcaaaacgttcaccacaggcagacagcgcctgtacagcctgagcggaaaaaccgcagctaggcaatttaggcgagcctttcatgtacagcaggattgggttctctgctacctggcgctgaattttttcaatcgttgtcatctcttgcttcctcaagccatattatggctaacactgacgtcattgcgcttagccgtaataacaatctatttgttgcgttcaggttattgtaacgactgtggcgccccgaataaaacgccattttttgcagggttttatcacatcgcgcctatctgaataggctccgctacataaatactcattgagaataacatttttacttcagcaaattcaggaatatcttttatagcccccgattccaggatgaaagctaacactatgacaaatggttatttatgacgcattagctgcataaaaaggcggcaattgacaagccattaacgttttctcacaaaatctattagaatcatatagctctccgcttttttatacggcgagtttcagcaatactgtgagtcttccatcatccatttcagggtcaaggttggtagcgttattatgcgtttattcttcacgctctttgtgctgctgtttacccagctatttttaaatctggcacatgcttcgccgcaggcgcgcgtatctgccgaccagaaaaaaagccatgtgagtcaggctagccctgacgatcgcaaaaaacggaaagtcgataataaaagcagcagtaagaaagttaagccagtgacccaaattaaaaagaaagttacggctaaaaccgcggctaaatcgacgacgggtaaagtaagcaaaaccaaaacaaccgccaacgcgaaaaccttaacccaaaagaaaagcgttacggctaaaaaaaacgttacccgtaaagaaacgaaagtggcttatgggcgacatcgaaatagcacgagcaaaaaagcagcggcagaattactcgcgaataacaaactaaaactcagtccggcacataaaaagcgctatcagcacgccaaacagacggcgatgagtaagctgatgaaacaagttgggaaaccctatcgctgggggggatcttcgccgaataccgggtttgactgtagcggactcatttattatgcctacaaagatgtggtcagaataaaaatgccgcgcaccgcgaatgaaatgtaccacctgcgcgatgccgcgccggttaaacgcgcagagctggaaagtggcgatctggtgttcttcaatattgctaatcgcggcgtcgccgatcacgttggagtttatttaggcaacgggaaatttatccagtctccgcgtaccggcgaagaaattcgcatcagtatgttagataacgattactggcaaggccattacgttggggcgcgccgcgtcgtgacccctaaaactattcgctaaaactatttgctaaacgtactcgttaaaatcatgctctcaaactttcgctccgccggtttattggccgtcggagcgtttctacccggctctcagcccctgtgttccaccaatcgaataacccatcgccaatcactttaactctgtgtggttaaacctggttttccagtgggaaattgataatattgatacccataacaactatatgacaattatttatccgctcgtcgccaccgggatcgccctggcgcatccggtgatttgatgggcaaacaccctgagtcatcccgaaaggagaaagcaatgtcttttgaattacctgcactgccttatgcaaagaacgcccttgagcctcatatctcggcagaaacgctggattatcactacggcaagcaccacaacacctacgtggtaaacctgaataatttgattaaagataccgagtttgctggtcaatcgctggaagagatcgtaaaaacctccactggcggtatcttcaataacgccgctcaagtatggaatcacaccttctactggaactgcctggcgccaaacgccggtggcgaaccgaagggcgcagtagccgaagcgatcgccgcatcttttgggtctttcgcggagttcaaacaacagtttaccgatgctgccgtgaaaaactttggcgcgggttggacctggctggtgaaaaaaccggacggctcgctggcgatcgtgagcacttctaatgcagcaacgccgctaaccacttcggataaaccattgctgactgtcgatgtgtgggagcacgcttactatatcgattaccgcaatgcgcggccgacttatctggaaaacttctgggcgctggttaactgggcgttcgtagagaaaaatctggcctgattagctggctaatatcaagggcggataacggctccgcccttctcgctcaaaatctgtacagctctaaaacagtcagggtttagttcattaccgctgtaaagctaaagatcataatcactgccaacgaaccaatagtagtaatcaatgacattttcagatcagtatccatataaactcctcagtcggttaatttgggtggataaaggcacatagttagtgtgtaaaacgattttcccacagttcgagaataaaatcttgttatcattactcactttataacgttgattagatctttcactttttctttaaatcggccaaaatccgcagttcattactgcgtaccgaccaataacgcctaaaaacccctttcagactagcgcgctgacgaaaataaccagcggaactgatgatatctgtctgaaagggttcgaacaacgcaggcaaacgattaacataatacttacctgctgtaacaggtcagtttaggagtcattctttttatggcaacgattaaagatgtggccaaacgcgcgggcgtttccaccaccaccgtttcgcacgtcatcaataaaacacgtttcgtcgccgaagacaccaaggccgccgtgtgggccgccattaaagagctgcactattcgcccagtgccgtcgcacgaagcctgaaagtcaatcacactaaatcgattggtttgctagccacttccagcgaagcaccctattttgcggaagtgatcgaagcggtagaaaatagctgctatagcaaaggctatacgctgattttgtgtaactctcataataatctggataagcagaaagcgtatctggctatgctggcgcaaaaacgcgtcgacggtttgctggtaatgtgttccgagtatccagagcaactgttgggcatgctggaagattatcgcaatattccgatggtagtcatggattggggcaccgcgcgcggcgattttaccgactccattattgataatgcctttgaaggcggttatttggctggccgttatctgattgaacgcggtcatcgcgatattggagccattccggggcaactggctcgcaatactggcggtgggcgtcatcagggctttatcaaagcgttggaagaagccaatattaaactgcgtgatgaatgggtggttcaaggggattttgaaccggaatccggttataaagccatgcatcaaatcctaacgcagaaacatcgcccaaccgcggtattctgcggcggcgatattatggctatgggcgctatttgtgctgccgatgaattaggtttacgcgttccgcaggatatttcggtgatcggatatgacaatgtgcgaaatgcgcgctatttctcaccggcactgaccactattcatcagccaaaagaacgtttgggcgaaagcgcctttgcaatgttgctggatcgcattgtcagcaaacgtgaagatccccaaaccattgaagtacatccaaaactggttgaacgccgttctgttgctgatggtcctttccgcgattatcgtcgttaaaaccgctgtgggaagccgtttagcccgttgaaacggcttcccgcgtgttttctacaccgtcccccgctcgcagccattcggcattcagcgtttccgtatccccaaggtactccagcagccacgccatagcgggcgaatggttgttttgctcccagctcaggcagcaagggctatctggcaagggctgagccagcgtaataatcaccagtttcccctgtttggccagcggctcgacgcgatgcgccggaaccataccaatacataaaccgtcacacagacagtcaatgcccgtttgccaatccggtgccaccagccgtcgctggttgtccagcgtccaggtatcgcgcttcggcagattacgggcagtgtcctcaatgcagagcgaagggtaaggccgcagctgatcgtcggtcaaagggccgctctgagatgccagcggatgagtggcactgaccacgcagtgccagttcataaaccccatatcacggaaggtaaagcgcccaccgactggcaccgcacgcgtcgcaccaatagccacatcggcacgaccatccgccagcgcatcccacacgccgttgaatacctcaaaatgcacccgcagttcgatatcggggaaatgacgataaaaatccagcaccaactgacggctgcgtaacggcttcacaataatgtcgatagcaatatccagatggccgcgccaaccgttagcgacctgctgacattgacgacgcgtatcaatcatttttttgataacagttcgcgcttctttaataaacagcgctcccgctgccgtcagttccacatcgcggtgtcgtcgttcaaacagtggcactgccagccatgtctcgagttgtctgaccgtatagctgacggcagaaggcacgcgatgcagttcttgtgcagcagcgctaaaactaccggttctggcaaccgcatcaaccacttccaatgaatattccgaccacattgccttgccttcaattattttcacaccagtatgcaaatattaccgtttcacaggggaatagccagccggatagaatgccccccgcattaattctcctgcaaagataacctgctttcggattgtagccaggcggcaacgccgcgaatcccaaggaaccgagccactaagtgactggggtgagcgaaggtagccaacaccgctgcggttcgaaagataacgggtatacagataaacgagataaataacgaaaatgaaaacatccactagctttatgttctacctcgccggtctgagcatgttgggataccttgccacggatatgtacttacccgcttttggcgccatgcaacaagatttgcaggcttcggctggctcgatcagcgccagtttgagcatttttctcgccggatttgccattgcacaattagtctggggacctttatccgataaattggggcggaaacctgtgttgttgctcggtttaagtctgtttgccttcggctgtttgggaatggtttgggtgcaaacgccggtacaactgttagcattacgtctggttcaggccgtgggagtttgttccgctgcggtgacctggcaagcgctggtgattgaccgttatcgcgatggcaaggccaatcgggtctttgccactattatgcctttggtcgccctttctcctgcgttagcacccctgctgggcgcctggttactgaaccactttagctggcgcgccattttcgtggtgctattggcgattactctgctgctgttgattccgactgctttattaaaagaaaagcaaaagaatgcgcaaagtagtgagagcgagaaagataatcttaacttctggcagattattaaatcgccgctattcagcggaaacgtgatgattttcgccgcttgcagcgctggtttctttgcctggctaaccggctcaccctttattttgggcgatatgggctatagcccgaatgtgattggcctgagctacgtcccgcaaaccctggctttcttgctgggtggttacggctgtcgcagcgcactgaattacatgaaaggcaatactctgttaccgtggcttctggttggttacgctttaagcatgatcgccctgtatctggtggcgaccctaacagaacctaacctgctgactttattaattccattctgcgtgatggcgctggtcaacggtgcctgttacccgattgtggtgtcaaatgcattaattccttttcccaataacaccgggaaggccgctgcattgcagaataccctacagctgggaacctgttttattgccagcatgttggtgtcagcctttattactcaaccgttattagccaccgtgaccgtcatggtgttgacggtattatttgcagcgctgggttatttcatacatttatatgccacaaataaggatgactctgataatcaaagagaattaatctcagagagtcatcattcctaagggaaattatttcagcctttctaacgcgccgagacagatttattattgagaaacctttccggcgcgcctatactcgatcccagttataaataaagccgttagaaaaaagtcatattagtttcatattttgtacacgttgatcgcgttacatttatccttaaggatgagtgaacctagtgccaaacgcagtagatttacttcttaatcttcctctgtccgtagttggatatcagacaccaaggtagccaatacctattcggtatgcgcctgcaattttttcgtttattgcgggacatcagtcagaagaaagtgatggagaaactatgagttcatcctgtatagaagaccaaagtattcaagaaaatccgtggtatcgcattgtgaatgaaatgttgagccaggccgatattgaaatcaatggttcaagacctttcgatattcaggttcataatcctgatttctttaagcgcgcattgcagcaaggctcgctgggactcggggaaagttatatggacggatggtgggactgtgaacgactggacatttttttccagcgcgtgctacgagccggtctggaaaagaaactcccccgccatttcaaagataccttacgcgtcgcaaccgcccgcctgactaacctgcaatcgaaaaaacgcgcctggatcgtcggcaaagaacattacgatctcggtaacgatctgtttagcagaatgctagacagccacatgcaatattcctgcggatactggaaagacgccgccaatctggaacaagcgcaggaacataaactgcgcatgatctgtgaaaaactgcggctgaaacccggcatgaaactgctggatatcggctgtggctgggggggattatccgcttttgccgcccgtcattatggcgtttccgttcagggcgtcaccatttctgccgaacagcaaaaactggcgcaagagcgctgcgccggactggatgtcactatcctgctgcaagactatcgagatttgcatcaacagtttgaccgcattgtttccgtcggtatgttcgaacacgttgggccaaagaactatccaacctattttgaagtcgtcgaacgcaatctaaaacccgatggtctgttcttgctgcatactattggcgcgaaccgtagcaatctgagcgttgatccgtggattgaccgctatatcttccctaacggctgcctgccttcgattcgacaaattgccgacgccagcgagtcgcggctcattatggaagactggcacaattttggcgctgactatgatcgcacgctgatggcgtggtacgaaaaattccgcgccgcgtggccagttttgtctgaaaaatactcggaacgatttgagagaatgttcagctattacctgaatgcctgcgccggtgcgttccgcgtcagagatattcagctatggcaggtattgtttagcccgcgcggcgttgatggcggtctccgcgttcctcgctaacgtctgattcacgggatcaaaaaaagggatacggccaaggctgttatcccttttctttttttcaggccgattaaagcagcatttgctccacagcgcggcgcttgcttcgattcagcgctgtaatgttaagattgcgctttagccgccatgtcactggccaaatgcgccgccgcgccggcgatatcccgctgagccaatatacgttctaccgtttcgaccaccgcctgggtttgcggatcgatttcaatattgacggtctgccccaaacgttttttgcccaaagtggtgcgttccagcgtttccggaatcaaatgcacgcagaaacgtttcccttctacttcgccaatggtcaggctgatgccgtcgataccgataaagcctttgtgcaacacgtatttcatcaaatcttcacttggcatacggaaccagatctggcgattattttcagacgtgtagattttggcaatctcggcggtgcaggtaatgtggccagacatcaggtgcccaccaatttcatcgctgaatttagccgcgcgctccagattcaccatatcgccaacctgtagctgacccaaattggtaatgcgcagcgtttctttaatcaaatcaaagctgaccaaatcgccttccaccttggtcaccgtgaggcagcaaccgttgtgagacacagatgcgcctaaagccagctctggcaacatatccgtagggaatttgatgacgtgggtgcgaaaattggccttttcatcgatggccacaactggcgcggtggccttaacaataccagtaaacataggcaatgcctcttattcgttatctatagcgaggaaaattatcttgattgacctcagtttgccctagaaaaaccggaaaaccaattcgcgaaaggtaaaaatctgcaaggttatctacttcgttgataataagttacaaatgattgcttaagcttttagagacggtacaatatttgccctcaaggacgatattttatcatcgtaactattagcctgcttaatcccaacattattagaaaggtgtgtacttgcaaaagtatctaacagaagtccgctgcttattagcgctggctattccggtggtgatcgcctcggtatcccaaactgccatgggggtggtcgatactattatggccggctcggtcagtgccaccgacatggcggccgtcgccgtcggtacctcaatctggctccccgttatcctgttcggtcacggcctgctcttggcattaacgccaaccgtagctcaattaaatggctcaggtcgccgtgaccaaatcgctcatcagattcgccagggcttttggctggcgtcgatattatcggtgctgattatgactctgctgtatcacagcgaccatgtcatcacccgaatgcataacatcgatccggtcatggcagaaaaagccgtgggcttcttgcacgcgattctgtggggcgcgccgggttatctgttcttccaggttttgcgtaatcagtgtgagggattatccaaaaccaaaccggggatggtgattggttttcttggcctgctggtcaatatccccatcaactacatcttcatctacggtaagtttggcgcaccggcgctgggtggcgtgggctgtggcgtggcgaccgccagcgtgtactgggtgatgttcctgatgatgcgttggtatgtgaccaaagcccgttcacagcaggatatcaagctggaaaaaggcttcgcaccaccggattggcatgtaatgaaacgcctgagcggcctcggtttgccgattgctctggcgctgttttttgaagtgacgctttttgccgtcgtggcgctgttggtctcccccttggggattgtgccggtagctggacatcagatcgcacttaacttcagctcactgatgtttatgttacccatgtctctcagcgtagcggcaacgattcgcgtaggacatcgtttgggcgaaggctctgttgcagccgcgcaggtttcggcttataccgccatcgccgtcggcctgtgtctggcgatgatgacggcgatatcgaccgtgatattccgcgaacaaatcgccctgctctacaacaaatcgccggaagtggtgattatggcgtctcatctgatgctactggcggcaatttatcagctgtctgacgcggtacaagtgatcggcagcggcgtacttcgcggctataaagatacccgttctatcttctttatcacctttacatcttattgggtgttaggtttgccgagcggctatattctagccctgaccgattatgtggtcccggcgatggggccaagcggtttctggaccggtttcattatcggtctgaccgctgcggcgattctgatgacattgcgaattcgttggctgcaaaggcaacccgccgagtttattttgcagcgtgccgcacattaaactcgtcgcagttatgattcgggaaataaagttctaaaaaaacctgcgccgggttattccgcccggtgcaggaaaatccgaatcaaagctggagaaaaaaacgtcgcaatgagcgaaagctcagcaatcgcgtgaaattacgaataaaattgcgtttttctccttgccagaggacgggctgcccgttaatattcgtccccgccgtcacctttgatggccggtaataatcgatgcgtccgtagctcagttggttagagcaccaccttgacatggtgggggtcggtggttcgagtccactcggacgcaccaacattattatcaagcattggcagtagattgaatgatatgcgtccgtagctcagttggttagagcaccaccttgacatggtgggggtcggtggttcgagtccactcggacgcaccattcaaacatcagattgacaagattattcagtgcgtccgtagctcagttggttagagcaccaccttgacatggtgggggtcggtggttcgagtccactcggacgcaccaaatcttgattcttaccgcgctttctcattcattcttctcattctcaaccgctattctcatgacccgcaaaatgcttcaattcgtttttccaagttcctgacgatccagcgcattcacctcgattttattcgctgtatagcccctaatgtcacataaaatttacactctgtatgcttaatcactgactgttgcgcaacaaatcgcgccgagcgcctcagtttgcgctacatttgcgtgatttttatcaaaactggtgatgagaatttgattttcatttcatttccggtcacttacgccgtataatacgaaccgtcgtttcagttgaatggtttcagcatcttgatctatagatacgctaaaaaaatacaactcctcaattggctgtcgcagacaggcccagcgcgaagtcctgcgcaaaagttttccgctcgatctcttcaactgtcacctattcttagtattgtttcattacaccagacacgccccacattccgttccgtcagcctagctggcggattctttcgctttttatccatcacaacttgtagaaaaatccgtcatgaaaaagactaaaattgtttgtactatcgggccaaaaaccgaatctgaagaaatgttgaccaacctgctgaaagcaggaatgaacgtcatgcgtttgaacttctcccacggtgactatgctgagcacggtcaacgtatcaaaaatatccgtgcggttatggagaaaaccggtctgaaagcgggcatcctgctggacaccaaaggcccggaaatccgcaccatgaaactggaaggcggtaaagacgtggcgctggttgctggccagaccttcaccttcaccactgaccagagcgtgattggtaacaaccaaactgtcgccgttacctacgctggcttcgccgctgacctgaaaatcggtaacaccgtgctggttgatgacggtttgatcggtatggaagtgattgaagtcactgaaagcactgtcgtttgtaaagtactgaacaacggcgatctgggcgaaaacaaaggcgttaacctgccgggcgtttccatccaactgcctgcactggctgaaaaagacaaaggcgacctgatctttggttgtgagcaaggcgttgacttcgttgcggcttcctttattcgtaaacgttctgacgtgctggaaatccgtgagcacctgaaagcccacggcggcgaacacattcagatcatctccaaaattgaaaaccaggaaggcctgaataacttcgacgaaattctggaagcgtctgacggtatcatggttgctcgtggcgacctgggcgttgaaatcccggttgaagaagttatcttcgcgcagaagatgatgatcgagaaatgtaaccgcgcgcgtaaagtggtcatcaccgccacccaaatgctcgattccatgatcaaaaacccgcgccctacccgcgcagaagccggcgacgtagctaacgccattctggacggtaccgacgcagtgatgctgtccggtgaaagcgccaagggtaaatacccgctggagtccgtgagcatcatggcgaccatctgtgagcgtacagatcgcgttatgcctagccgcatcgaatcactgaacgacaaccgcaaaatgcgtatcaccgaagccgtttgccgtggtgcagttgaaaccgcagagaaactgggtgctccgttgatcgtcgttgcaaccggcggcggcaagtcagccaagtcggtacgtaaatacttcccaaccgcgactattctggcgctgaccaccaatgaagtgactgcgcgtcagttaattctgaccaaaggcgttatcccttccgtcgtgaaagaaattgcttctaccgatgatttctaccgtattggtaaagaagcggcattggcaagcggtctggcgcagaaaggtgacgtagtcgtgatggtttctggtgcactggtaccaagcggcacgaccaatacttcttcagtacacgttctttaatccaactcgggttgttctgctgaatatatttaaacgccgcttattacagcggcgtttttcttttatctttttgttcccgtcctttctcaaaaaacatttaatcccaccccggttacaggctgttttataaataagacttgtcccatggagtacattggttttgtttttattttttaacgattttttaaaaccagacgcttctttgagcgaacgatcaaaataaagctcattaacataaaaaatttattctctttcgaaaaaagtttgtgtaatacttgtatcgctacatggagattaacttaatctagagggtgttaataatgaatcgtactaaacttgtactgggcgcggtaattctggcttctactatgctggctggttgttcaagcaatgctaaaattgatcaactgtcttcagacgttcagactctgaacgctaaagttgaccaactgagcaacgacgtgaacgcaatccgttctgacgttcaagcagctaaagacgatgcagcacgtgctaaccaacgtctggacaaccaagctcacgcttacaagaagtaatattacttcaatgaaaaatggcgcacattgtgcgccattttttttaccccgaacaatcccctcaccttcgtcatttgcactttatccttatccggtaagtcgatttatttatctgctggaacaatgaaagcatccttgctttcatcttgtcccgcaacgtcgaggcgtttatttgcggtgattagtgggactcagaatagattgggcctggctgagtaagcttagggatagtctgttcttcagcctgtgacgcttccagaggggctacagcagccggagcggcatcagaggctaccattcctttgctggctaatactggcatcccagaacggcgtacaatcgcactttcaaccactgcggtatctgtctcgccatcggccataaaggctttcacaccggcactcagcgcgattggcatggtttgcggatcgtcattgtctgtacgggacagcggctggtgaacttctacgtagcgtttaccgtccggttcaacagaatatttgatcggctcattgataatctgtacgcgggtgcctttaggtaccgagttgaacagcgcctgaatatcgtcaggacgcagacggatacagccagagctaacgcgcatgccgataccgaagttagcgttggtaccgtgaatcaggtactcaccggcaccggcagacagacgcatcgcaaacagacccataggattttccggaccggcaggaacaacggccggtaaagtcacgccttgcgccagatagtgcttacgaatattcgccgttggcgtccaggttggattcgggattttctgactgacggaggtcgtcataattggggtgttacgccctaactggccgataccgattggataaacgatgactttatcctgaccttttggatagtagtacagacgcagttctgccaggttaatcacaatgccttcacgcggggtgtctggcagtatcatttgcgttggaatggttaacactgaacccggcttaggtaagtacggatcggtgcctgggttggcttccagcatacccaatagaccgattttataatcggcagcaatagcctccagcggacggccatcgtttggaacggtaaaggtagtattttcaccaataagacgactattggccggtggcagaggatattcagttgcattggccgcagtgatactgcctgccatacaggtggcgaataacatacctatcaaagttaatgcacgtttcatgcttagttcctacatcacttcttcaaattcggtttatacggcgagctagttcgtgtgattttcatagccaataattggcaaaactatactaacagtaatgattctaaaggcaatttatttctctaaaaatcaaggtgttagaaattaatttttctttgcctttttcgccccccagacaagatttaacctgctgaaatatcaccgttttaacactgtgactgacttcgcaaaaatatttttataacaattatgggtgaatagattaataaatgattaagaaggttctgagaggcagacacgctgcctcggaagaaaggtcactcagactaataatgatgctttattacgaattgcgcgaatcattgcttccaatccctgggatcgagatggcgttaaatgctggcttagagccaaatcggcaaaataagggcgaacgtccagatcgataatttgctgcggagttaacccctgatacagaataaagacgaccgcaactaacccttttacgatagtcgcatcgctgtcaccggcaaaatgaatagtgccctgctcggtcaaggtcaaggtcatgctgatccacacctggctctggcagccgctaatcaggttttctggctggcgctcggtgtcgctcaacggcggcaacatagcgcccaattcgatcacgtacaggtatttttcttcccaattatggcagcgggaaaaattgcgaatcaatttttgcttatctggcaacgtggccatggagaggcttcctaatacggtaaaaaataaagctgaccaagacgctagccagctttgataacggcaacgctctgaccaacaggcgctgcggagtttggctttacttagcctagcaaacgcttgacccgttgtaaccccgccaccagccggttgatatcctctcggctggtataaaccgccagagaagcgcggcacatgctcggaacgccgtagtgctgcatcaatggcatcgcacagtgatggccggtacgaatggcaatcccgtactgatcgagaaaacttcctacgtcaaaggcatgatgttgccccagattaaaggcaatgactcccgcccgtgacgctggaccgtacatgattaccccttcaacctgctgcagtgcttcgacggcgtaggccatcagctcatgctcgtagcgctgtatgttatccagccccagttcgctcaggtagctcattgccgcgcctaaccccatcatacccgcggtgttcggcgatccggcctcaaagcgccccggcgcatcagcgtaggtggttccttcggtcaggctgacggttttaatcatcgccccaccgccttcccacggcggcatttgctgcaacagttcgctttttccgtacagaataccaataccggtcggtccatacagtttgtggccggagaaagcataaaaatcacagcccagtttctgtacgtccaccgcctgatgcatcaccgcctgagcgccgtccaccagcaccagcaaaccggcggccttggccgttgccacgatttgctcaatcgggttaaccgtacccaatacgttggaaacgtgagtcatggccagcaaacgagtcgtatcatcgatcaggtgcggtagaacgctcagatccaattcgccgctcgcggtaatcggccagacgcgaatttcaatgccgcgctcctgagccagcatctgccagggaacgatattcgcgtgatgctccatttcggtgatgataatactgtcaccagctttgaggaaatgtcgcccgtagctgtttgccaccagattaatagcttcggtggtacctttcacaaaaacgatttcatccggcgagttggcatggataaattctgccgcctggcagcggacttgttccatcgcctgagtcgcctcagcgctgagggtgtgaattccccgatgcaccgccgcatagccgctgcggtaaaactctagctcgcgctcaatcaccgcattgggtttctgcgcgctagccgcgctgtccagataggccagcggctggccgttgacttcccgggcaagcaatggaaaatcggcgcgaatgcgttccagcgggtaactcatagttgttctctcatcattattctcccgccagacgctcggcaatccgctccatcaccagtttacggatggtttcgttgctcatcgcttcggtcaattccgcagcgaaagcaaagataatcatttgctgagcatcggcctgactgataccgcgggactgtagatagaacagctgttcggcgtcaatccgcccgacggtcgcaccgtggctgcacttcacgtcatcggcgtaaatttccagctgcggtttggtgtccacctctgccagtttgctcaacaacaggttgttattggtcatctgaccgtcggttttcagcgcgtgctgtgccaccttgatcatgccgttaaacacggccttgccccgctcccgcaccacggttttatgtagctgacggctttcgcaatagcctttattgtgttccagataggttcgggtatcacaaacttcgcggccaataggtaacagcaggctgttcatcgataaacttgcgccctcgccgttaagctgggcgctggtgttatggcgagtcagaccggcacccagcaagaaactgtagcttctggcgcgagcgtcacgtcccatcaccacgtcattatgagcaaagtgatagctttgcggcgtttcaaaggccagcttgcagtggctcagttgggcattgtcgccgacagaaatggtcagccgcgcgccggtaaagtgaggcaaatcattcaggctgacataatgctcgacaatatcagcctgagtattcgcttccagcatcacatggtggcgatagtggctggtattcaccagctcagtatctgcaccagagctgatatgcagcagatatagcggtttttccgcctgttttcccgctggcagacgaatcactgtgccctcctgcgccagactttccgtcagatgcaggaatacctcagattgcaccggggcaggcaattcggaggcagcagtcagtgggctaaccagataaacaccgaattcggtatcgctcaggctggcgtcgaaacggccgtccacaaagaccagacgataggcgtctagcggcagcgccagcgcggttaactgctgtgagctaacctgtgtctgagcaaagccaaaacgttgttcaagcaagtggttaatcggcgtatatttccagtcttcatgctttgcggttgggaaacccaacctctgagcctgctgccaatggctatcggcacgcccaccgcgagcgccttgctgtaccaattgactcagttgctgcagtaccgtagcactgttctgatgcgggttattactgttggtcggtaagccagccatagccttgctcctccaactgtttgactagcgagaagtcaccggacttgataattttgccctgatacagcacgtgtacgaagtcgggcttcacgtaatccagaatacgttgatagtgggttacgatgatgaaagcacgtttttcattgcgtagagagttcaccccgttcgccacgatttttaacgcatcgatgtccagaccggagtcggtttcatccagaatgcacagatctggctccaacgccgccatttgcaggatgtcattacgttttttctcaccgccggagaaaccaacgttcaccgaacgagtcagcaaatcttccggcatcttcaacagttcaattttttcttcaatgaaatcggaaaaatcgaagcgatctaaaggttcttcttcacggtatttacgtaccgcattcacggccgtttgcaggaagaaatggttactgacaccgggaatttctaccggatactggaacgccaggaaaaccccttcaccggcgcgttcttccggatccagcgccaacagatccttacctttaaagatcacttcgcctgcggtgacttcatattcttcacggccggccagcgtggcggacaaggtacttttacccgagccgttcggccccatgatggcatgaacttcaccgggtttgatttccagattcaggcctttgaggatctcgttgccttctacgctgacttttaaattcttgatgcttaacatgctgtttcctttgtgcgccgtggcgcaacgctgtgcggtgcaaatgccacgggattaacccacgctgtgttccaggctaatggcgagcaatttctgcgcttcgacggcaaattccagcggtaattccgagaagacatctttacagaatccgttgacgatcatcgagatagcgtcatcttcgctgatgccccgctgcagacaatagaacagttggtcatcgccaatcttggaggtggtggcttcgtgttccaactgagcgctgttgttgcgcacttccacatacgggaaggtgtgcgcgccggaatccggcccaatcaacatcgagtcgcactgggtaaagttacgggcattttccgcactcggtaggattttcaccagaccacgataggtattctggctatggccggcggaaatccccttggcgataatggtggatttagtatttttgccaatgtggatcatcttggtgccggtatcggcctgctgataaccgttggtcaacgccacggagaagaattcgccgatggagttatcgccctgcaaaatcacgctcgggtatttccaagtaatggccgagccggtttccgactgagtccacgacatttttgaaccttccccttcacacagagcgcgcttggtaacaaagttgagaatgccgccggtgctggccgtaccggcaaaccagttttgcaccgtggaatatttcacttcggcatttttgtgcagaatcacttccaccaccgccgcatgcaactgataggtatcacgcaccggcgcagaacagccttcgatatagcttacgtagctgtcttcatcggcaatcagaatggtgcgttcgaactggccggttttcgccgcgttaatccggaagtaggtagaaagctccatcgggcaacgcacgcctttcggcacgtatacgaaggtgccgtccgaagccacggcggcgttcaatgcggcaaagaagttatctttggcgggcactacactgccgaggtatttgcgaaccagatccgggaattcctgaattgcttcaccaaaagagcagaaaataatcccgtggccagccagtttttcacgataagtggtggcgaccgaaaccgaatcaaaaatcgcatctaccgccacttccgccccttcacgaaccggaacccctaactgggcaaaggcgttttccacttctgcggtgagataatcattggcggcggtgccgagatcttcgccgtcggtcggctgctgcactgcgccgggttgggaaccgcagttgtcatcgcagctaccgcaagatggtgccgagtaatagctgtaatcctgataatccaggctttgatagtgggctttcagccaatgcggttcttccatctccagccagcttcgataagcaccgagacggaattccagcatccactcaggttcgttacgtttggccgaaatcgctcgcaccacatcttcgttgatgcctttggccaactcatcggtggctaaatgggtaaagaagccttctttgtaacgaccatcactgacccaagcctgcacatcatctggaacttctacattgcttcgtgtcatttcgtttacatcactcaaacgccaaaactctcgccacaaccgcaggcatgctgagctttaggattattaaatttaaagatctgattcagcccttcgcggacataatctacttccgtgccatcaataaaaggcatcgcttttaacggtacaaaaattttggcttcgccatgctcgaaaaccagatcgtcattggcagggttttttgccatgtccatcacgtaggcaaacccggcgcagccggattgtttaacgcccagatgcagccctttcacttcgggatcttgctgcattaagcgggcaatctgcgcggcggcactgtcagtaatggtgacgccctgccaatcattgtcgtcgagtgaaaatgtaccaactgtatcctgttgcatatgacctaccttatctatctcaacaaccttattagttgttattatgctggttgaacctcactcggcgtcaacacagattgttcacaatggtagtgataataattatcacttcaaccgtttgttttgcagggatattaagaaaagtgcctttttaaccccgggtgaggcggcaacctataaggaacgctgcgatggccagaaaaaacggaagagagtcgcacaatattatcattatgaaatcacacaatatatttcataataataactgaaaaccctgcattattagaggccaatttccctttacttctaataattttaaacattcataggaaatacctatttctacgctaactttagccgaaaatccccctcggaggaaacctctacggcaaaaagtgaccgatttgatcgtgaaaaaataagccgttcgcgggtaagggattgaatgaaaggaaactgtgtctgacaaggattaagaaatattcagaaccggcgctgtccggttctgaaaataccgcttcagattaggcaaaatgaagacagacgctagctgcctaaaattgccgtagtgagacgtgatgtacagcaaagccgatcctgctgatcgaaaatctcgatctgccaaacctgatgagtacggccagcgtgaaccgcccgacacacgccgcgaaccaccccttcccgcaccgctctcaggtggttggcattaatttccaaccctaccacctgttgatcacattcggtggatagataacccgccattgagcccagcgattccgccaacaccacagacgccccgccgtgcagtaggccaaaaggctggcgcgtgcggtgatccaccggcattgtcccttcgatttcattgtccccgatgcgggtaatttcgatgcccaaatgggacaccatgcaaccttcacccacttgattcaagtctgccagcgtagctgctcgtttccaaagcattaaactatctccaatagagcctgtaacggatgcctgaggctatttccttccattcgttttacctggctacggcatgaataacccgttgccagacagcgtttttccggcaatttctgcaatgcctgctgccatgatagttcataaattccgatcgagttatggagattcttcgattcgtgaccgtaggtgcccgccataccgcaacagccaacgctgacgttttccagccgcgcgccgtagcgtgaaaatatccccgcccactgctgcccgctggccggtagcgcggtgctttcagtacagtggccaaacaaataccaaggttcatcgttcaatggctgcgctgggctatccggcaatgtcgtctgtaaccattcatgtaccagttgcaccttaaagtgaccgcgacgctctccaagcatttcctgatattcatcgcgatagcacagtaccaaggccggatcgacgcccaccagcggcatgcctaataaggaaattcgattaaggaactcggcggttttagtcgcagttttagcgaatcgctgtaaaaaacctttgatatgttgggctttaccattaggcgaaaacggcagcaagaccggattaaaaccgagtttttctaccaatcgaacaaaatcagccaccacctgtgcatcgtaataactggtaaaaggatcctgtacaattagcacatgatggctacgttcttcatcactcagtttttccaactgttccatcgtcatcgtgctggcatagtggccggaaagcgcctgtttcagggtcggcgtcgagagcagcggtaaatccaccatcccaatactccggcgactcagttcgctcacccacggctgtttcaggaagaaattgaacaggttgggcgccttggccatcagcggcgtatagctttccacgccagcgaccacgtaatcacgcaacggacggtgataacgggtgtgatacagctgcaggaagcgcgaacggaaccccggcacgtcaattttaatcgggcattgagtcgaacaggctttgcaggccagacagcctgacatcgcctccttcacttcatgggagaaatcgtagtcccctcgattggcgcgccagctatgtctggttttttcgatcagtccacgcaggctaggccggcgattagccaggccgttttccagtaccagaggatcgacgccctgttcgctcagcaaacgcagccattcccgcaccaatgtggcgcgacctttcggggaatgaatgcggttgccgctgattttcattgaaggacacatcgggctgcgagcatcgaaattaaagcataatccgttgccgttacattccattgcgccgcggaatgacgtgcgcaccgtcagcggaatttgtcgatcctttatgccgcgttttgccgaggtatcgactttcatcatcggcgcatcactgtctaacggagaacagattttccccggattcaggcgattgagcggatcgaaagcagacttaatgcgccgcagctcgtgatacagtttttcaccgaagaaacccgggctatattcagcgcggaaaccttttccgtgttctccccacagtaagcccccgtaacgcgcagtcagctcgactatccgatcggaaagctgtttcatcagcatttcctgctgcggatcgcacatgtccaaagccggacgcacatgcagcacgccggcgtctacgtgaccaaacatgccataactcaggttatggctatccagcaactgacggaattcgacgatatagtccgccagattttgcggcggaacgcaggtatcttcggcaaaaggaatgggtttagcctgacccttactgtttccgagcaatcctacggcttttttacgcataccgtagatgcgctcaataccggccagatcgtcacaaatctgatagccaatcacaccgccctgctgcgtagacatcaattcatctaaccgctgacacaacgaggccatttgctcgtcgataagttcccgatcatctccggcgaattcgacaatattcagtcccaatagcgtcttatctggcacatcggtgatcaattctttaactgaatgccacacaatgtcttctctggccagattcagcaccttagaatccaccgtttccaccgacagcgccttggcttccaccatgaaaggcgcattgcgcaaggccgaatcgaaggaatcatatttaacgttcaccaaacgccgcactttcggcagacgggtaatgtccagcttggcttcggtaataaaggccagcgtgccttccgacccgcatagaatacgtgttaaatcaaaagattgcagatcatcactcaaaacatggcgcagatcgtaaccggtcaggaaacggttcagtttggggaatttttccagaatcagcgcgcggttatcccgacaactctccagcacgctacgataaatacgcccaattaccgactcctcggcggcgatcgcttcggcctgagcagttggcagcgcgcgagtatccagcagttcgccccccaaaagcaccgctcgcagacctaaaacatgatcggacgttttgccatacaccaacgagccttgcccggaagcatcggtattaatcatgccgcctaacgtggcgcggttgctggtagagagttcgggagagaagaaatagccgtgcggacgcaaatattgattaagttgatctttaatcacaccggcttcaactcgcacccagccttgctcagtgttgatttccagaatgcgattcatatggcgggacatatccaccacaataccggtattcagtgcttgaccgttggtgcctgtgccgccgccacgtggggcaaaggtcaaagattgaaacgtcgattctccggccaaacgaccaatcagggtgacatcggcggtggatcgcgggaataccaccgcatcgggcagcaattggtagatactgttgtccgttgccatcgtcaggcggtcggcgtaatcggtggcggtgtcgccggtaaaaccgtgttgcttcaatgccttcaaaaagtccagcaccagcggtaagacgccaggggcctgagaaatccgtgggatcattatggttgaccctatctatgttgttttcacacacgccatccgccgcgcatcaccctgtcacatcagcgaatatacgtactccagtggcagaaaggttagccgcttgttaatgctcttgtcgaatcatttatgacaattcagaatgatgagaaaggcttggctcattgcagggaggaatagaataataattgattaacgatcaacattttatattgccctgccaacgaacagatcaactcgcatagagtgtaaaaaagcccacgtcagaaactttcaggcagcaaacgtcgcggtaaaaccggcgttgtaaaacacgaatacggggttggcataagaagatgtaaaccattccgcgccgctggtgccattagcgtcgagtctagctctgcggcattctctctctataacgcgatacctctgtgatatttctctcaatagaacgacatcgctgtaacaccggctattccccgaaccaaatgattcgcgaatgaatctacctcacaaaataagcgtgcttttattactcagctccgtcagtaaaaatgctatgaatctgttaaattacgcaaaaatacaccatgattagacagtcagtccgaatacggcgaccttgccctacttatcgaaacgagaactcaccgatgaattacccgcaacaacatcgttacgacttacccaaactcatatttggcgtgatattcattttgataatgatcattgccagcttctgggtggttcaaccctttattttggggttcgcctgggcgggaatggtggttattgctacctggcctttattgattcgtttgcaggggttactttggggacggcgctcattagccgttgtcattatgacactgctgttaattctgctgttcgttatcccaattgcgctgttggtcagtagcgttttggaaaatagcgctccgttaattaaatgggccagcagtccggcgaatttacagataccggaaatggcatggctaaaatctgttccgatgctcggtaacaaactctacagcagctggcataccctgatagccggcggcggcaatgcgctaatggcgaaagttcagccttacgtgggggaaaccgccacctggtttgtggctcaggccgctcacgttggccgcttcctgctgcatctgactctaatggtgttattcagtatcctgctgtatttccacggtgaaaacgtcgcactggggattcgccattttgccgttcgtctggcagataaacgcggcgatgctgccgtcatactggcggcgcaagccattcgggccgtagcgttgggcgtggttgttaccgcgctggtgcaagggattctgggcggaattggactggctatcgccggcatcccctacgcgatgttattgacggtagtgatgtttgtttgctgcgtcgcgcaacttggccccttactcgtactggttccggcggttatctggctgtactggagcggggacaatacttttggcactctgctattggtctggagctgcgtagtcggaacgctagacggcgtgctgcggccagtgctgatccgtatgggcgcagacctgcctatgatcctgattctgtctggcgttatcggcggtttgctctccttcggcatgattggcctgtttattggcccggtggttctggccgtctcatatcgcctggtgagcgcctggattcatgaagcgcctgagccggtagaagatgtcgccgaagtcgctaaacacttagatgaactctaatagcacaatggctcgttggtaatactggcgagccattattttctcattccctccttgcccaaataatagataaagctttaggttcaacactctccattcttttttcacgttaagaaactcaagtttattaaaacagcattgttattcactataaaaccgcccacactctttcatttagtcactgataaacaaccgtttttattaggatgattcttaatgactatctaacttattttatttaagattattattaatcgacaactcatttgagatgtttaaataaatcagtagattattgctttatcgcaatatcagcaccgaataccctaattgctgtgtgtagtctttgcctatctcctatgatgggcttttttttgtcttccgcgccaaataatgaattattgcctctcacccttatattcccaatcaaaaacagtttctaaaggttataaaattccagaaaaaaatccgcagcctaagctacggatcttcaaagaatgacgtaccttagatattaatgggttacaggtttaacctgccccaaatccatccaggtttgcactacggtatccgggttcagagacagactatcaatgccctgctccatcagccacagagcaaaatcggcgtgatctgacgggccctgcccacaaatcccgacgtatttaccctgccgttttgccgcctgaatcgccatcgacagcaaggctttcaccgcctcgttgcgctcatcaaacagctcagataccacgccggaatcacgatccagccccaacgtcagctgcgtcatatcgttcgaaccaatggagaatccgtcgaaatgttggaggaattgatcggccaataatgcgttcgaggggatttcacacatcataatgactttcaggccattctcaccacgtttcagcccttgcttagccagttcggctaccaccgcctccgcctgcgccacggtacgcacgaatggcaccatgatttcaacgttggttaaccccatttcgttacgcacacgtttgacagcttcacattccaaggcgaaacaatcacggaagctatcggccacgtaacgaccggcaccgcggaagcccagcatcgggttctcttcatgaggttcgtaggccgcgccgcccaccagattggcgtattcgttggatttgaagtcagacagacgcacgatcacgcgttttggccagaaagccgcacccaacgtcgaaatgccttcggtcaggcggccgacgtaaaactcaaccggatcgtcgtagccgtgcatcagcgctttaatttcagcctgcaacgccggttcctgcttatcaaattccagcagcgcccttgggtgcacgcctatcatgcggttgataataaactccagacgcgccagaccaaccccttcgtttggcaaacgggcgaagtcaaaagcacgatcaggattaccgacgttcatcatgatttttaacggtaactcaggcagttcggtcacttcggagctttgcactgaaaagtccagtagatcctgatagacaaagccggtatccccttcggcgcaggatacggtcaccttctggccttcacgcagacgatcggtggcatccccacaacccacaaccgcaggaatccccagttcacgggcaataatcgctgcatgacaagttcgccccccgcggttggtgacaatggccgacgcctttttcatgataggttcccaatcaggatcggtcatatctgtcaccagaacatcaccgggctgaatgcgatccatctcgctaatatcatgaatgactttgaccggacctgaaccgattcggtgaccgatagctcgcccttcaaccagcacttcgctctggttgttcaacaggtagcgttccatcacttgttcattggaacgaacggtttccggacgcgcctgtacgataaacagcttgccggtgtgaccgtctttggcccactcgatatccatcgggcgaccataatgctgctcaatcagtaaagcctgatgagccaaggattcgacttctttatcggtcaaagcgaaacgattgcgcagatcttctggtacatcttcaatacacacctgtttgccgtgttcttggctatcggcatacaccatacgaatttttttcgaacccatattgcgacgaacaatggccggtttgccattacgcagcgtaggtttgtgaacgtagaattcatcaggattaaccgcgccctgcaccaccatctcacccaaaccgtgggcggcggtgataaataccacctgatcaaaaccggattcggtatcgatggtgaacatcacgccggacgaggccagatcggagcgcaccatccgctgaacgccggcagacagcgccacgccgcgatgatcgtaaccctgatgcacccggtaggagatggcgcggtcattaaacagggaggcaaacacatgtttaatcgccaccatcaccgcatcgataccctgaacgttgaggaaggtttcttgttgacccgcaaaggacgcatcgggcatgtcttccgccgtcgccgaggagcgcacggcaaaggaggcttccggctcgccgtcggcaagctgttgataagcttcatgaatagcttgttcaaactcaggatggaacggcgtatcaatcacccattgacgaatctgggcaccggcgttagccaactgcgcgatatcatcaacgtcggtgttatccagcagctcataaatacgttggttaacgccactttgctcgagaaagtcgttaaacgcctcggccgtggtggcaaatccgttgggaacagaaacgcccagttcagaaagattggttatcatttcacccagggaggcattcttaccgcccacacggtcaacatcgtgcataccaagctggttgtaccaaagcacattacgcagggttcggccattgttcgacatctaaacaatccttttacattcagtagggtacgaataaaagttatctttgctgttaaacagcagggatcagactagcacaatgctccgttagctatggacaggtgaatcgatcaacccaacacaaaaaaattttttaagggcaattctgcggcaaaagctttacccaaaacgggaataaggcacactatcagacagatcacagatgattattcgggcagtggcttaaaggagtcagggtggaaagaagcgttttttatatttcagacggtaccgccattacggcggaagtcttggggcacgccgtgctatcgcagtttccggttgatgccacgacctttaccttaccttttgtcgaaagcgccgcccgtgctgaagcggtttgccagcagataaatgagatttatcagtctaccggcgtccgcccgctggtgttctattcgattatttcgtcggaagtccgcgagataatccaacgcagtgagggattctgtcaggacatcgtccagtcgctggttgcgccactccaggacgaactgggcgttgcgcctcagccggtgctcaaccgcacccacggcctgaccgaaagcaatttgggaaaatacgacgcccgtatcgccgctatcgattatgcgctggctcatgatgacggcatttcgttgcgcaatctggatcaggcgcaggtgattttgctgggcgtatctcgttgcggtaaaacgcccaccagtctgtatctggcgatgcaatttggcattcgtgccgccaactacccttttattgccgatgatatggataatctgcagttacctgcggcgcttaaaccctttcagcacaaactgttcggtttaaccataaaccccgagcggctggcagcaattcgtgaagagcggcgggaaaacagtcgttatgcctctttacgacagtgtcgtatggaagtcggcgaagtcgaggcgctgtttcgcaagaatcaaatccgctatctaaattccaccaattattccgttgaagagatatcgaccaaaatcctggatattttaggaatgagtcgccggatgttttaaggctgcattcatataaatgattgaatataccgaattcgatataaattctattaatctcctctgcggcggttgaattcgtctggttttggtttattgtgatcgccatcacttcccggtattcctgccgcagagaagaacatttttagagaatatccatgcataaaacagatgaactgcggaccgcgcgcatcgatagcctgatcacgccacaacagttggcggataagttgcctatctcttccggcgtagccaataacgtgaccgcgtcacgtaagcgcattgaaaaaatcctgaccggtgaagatcctcgtctattagtggtggtcggcccctgctctattcacgatctggatgctgccattgattatgctactcgcctgaatgtgctgcgggaacgctatgcagatcgactggaaatcgtgatgcgtacctatttcgaaaaacctcgcaccgtggtgggctggaaaggtttgatctccgatccgacgctagatggctcctgtcaggtcaatcttggcatagaattggcacgtaagctgttgctgagcgtgaatgaactgggattaccaacggccaccgagtttctggatatggtgaccgggcaatatattgccgatttaattagctggggtgccatcggcgctcgcaccacggaaagtcagatccaccgtgaaatggcgtcggcgttgtcctgtccggttggctttaaaaacggcaccgatggcaacacccgtatcgctattgacgccattcgtgcggctcgggccggtcatatgttcctgtcgccggataaaaccggccagatgaccatctaccaaaccagcggtaacccttacggccacattataatgcgcggcggtaaacaacctaattatggcgctacggacattgccgctgcctgtgatagcctgcgtgaattcgatttacccgagcatttggtggtcgatttcagccacggtaattgccagaaaatgcatcgtcgccagttggaagtcgccgaagacatcggtcagcaaattcgcgccggttctacggcaatcgtgggtgtgatggcggagagtttcctggtcgagggcacgcaaaaaatcgtggccggacagccgttaacctacggccaatccatcaccgatccttgcctgaactgggtcgataccgaacatttattagcaattctgaatgacgccgtgaatacccgtttctaacctgccccaaccgacaatccgcgttaatcattaatgcttcaaatttagccagttcagatgtcatcaggcatctgaactggttgattttttctgaattccctcaggcttcaacgctgacttttacatgaaataataaccccaattgttaaataaattgggctattcggctgtcgcctcgtcttttgcatcagaagcgttattttgtatataattttttctttttgtaattaatgagatagaccagagacagcaggaaatcaaaaaagttgtccaaggcaatattttgcttgatgtaacctcccattcacatgataatgattatcaaattgataaccatttccgtttgcatctaatgaataaccctacttacagcgatttgtaccctgcaacggctagcggagcagaagattctctcccgctggtggagcaacctgcttgcatcaatagcgagcaactgcttggtagacatggactcgtcatcatcaaccatcaaggacaattttatcagctgcggcagaccaaatccggcaagctgatattgaccaaataataactgctccttgagatactttttcgcgagccacccagatcgttcgatcgaggcagccagcaatctaatgattatgtttaactacatatggagaattgccagatgtctcgtgcttcatctacgttgttccgtgcgtcatcgctgagtttggctatcgcctgcgccattccttcgctggcctacgccgcgcctaccgcaccgagcgaatccgctgccacaacagaaacagccaagaaaaaagcggtccattccagtgaaaccatgaccgttgtcgccacgggtaacccgcgcagtagctttgacgcaccgatgatggtgacggttatcgaaggggattcgccgctcagccagacggccagcacctcagccgatatgctgcgtcgcgtgccaggcatcctgatttcaggcacgggacgtactaacggtcaggacgtcagcctgcgcggctataaccgtaacggcgtattgacactggtcgacggcatccgtcaaggcaccgacaccggccatatcaatagcaccttcctcgatcctatgctggtcaaacagattgaaatcgtgcgtggcccagcggccatgctatacggcagcggcgcattgggtggcgtaatctcctatcaaaccgttgatgccgccgatctgctggagccgggtcacagtagcggttaccgcgtatttggcttaggtgccaccggtgatcacagcttgggcatgggggcttctgccttcggtaaaaccgatgatttggacggtttgatttcctttggcactcgcgacgtaggtaatcttcgccaaagtaatggtttcagcgcgcccaatgacgaagcgattagtaacgttctggcaaaaggcacctggatcatcgatgataaccagtctctgagcaccaacctgcgctattacaataaccgcgcccgggagccaaagaatccccaaacgcccgccgcttccgccggtaacctgatgaccgaccgctcgaccattcagcgcgatgcacagttgagctataagctgcatccgcagggtcagaattggctggacgccacggcaacggcctactactccgatgtcaatattgataccaccaccaggggcaccggctttgaaggccgcgagcagaaaacccacggcgcgaaactggaaaatcgcactcgcctgttcgctgacagcgctgcatcgcacctgttgacctacggcaccgaagcctatcgtcaggaacaaacgcctagcggcgtcaccaccagcttcccgcaggctaaaatcaactttgcttccggctgggcgcaggacgaaattactctacgcgatctgccggtgaccgtgctggcgggtacgcgtttcgacagctacagtgccagcagccaaagcaatgccgatgttgacgcagataaatggtcgtcgcgcggtgctgtcaccgtaaacccaaccgactggctgatggttttcggctcttatgcccaagcctttcgcgctcctacaatgggcgaaatatataatgattccaaacacttctcgatggggccatttaataactattggaaacccaatccgaatctgcgccccgaaagcaatgctacgcaggagttcggttttggcctgaactttgatggcgtattagccgagaacgacagcctgaaattcaaggccagctattttgatacgcaggccaaagataaaattgagatgaaagtcgataacctcacgaccacctctattaatattcaccgcgccaaaatatggggttgggatgccactatggattaccaaaccgattggtttaactggaatctggcctataaccgtacccgtggcaaaaatatggataccggcggattcctcgacagcaccaatccagacaccgtcaccagcgcattggatatcccgattgcctcgacaggcttctctgcgggttgggtcgccactatggttgaacgtaacaatatcgtgacccgcaacaccaaacagcaagccggttacggcgtcaatgatttctacattagctataaaggccgcgatcagttcaaaggggtgacgaccaccgccgtgctgggtaacgccttcgataaagagtattactcaccacaaggtattccgcaggatggccgcaacgccaaactgttcgttagctatcaatggtaattcatacccaggtatgaattaccccgtctaaattacctgagccagactcgattctggctcaggtatttctcaacaggagagaatgaatgtcagcaatactgtttacccaatatgagcaagctaaactcgacaatccaggcaaatttgcacgcgatctggcagagatccttggtatcagcgaagcggaattgacccacgctcgcgtaggccacggtgcagagcgcctgaaggtggatgctcggactctgctgaccgaactggaagcggttggcgtgaccaaatctattactcgcaataactacgcggtacacgagcaaatgggtcgttaccagaatcagagcctgaacggccacgccggtttgatcctgaatccgcgtgagctggatctgcgtctgttcctcggccaatgggataccgttttcgctctgcgtgaagcgacgaagcacggcgaacgctttagcttccagttctttgatctgcaaggtaatgcggttcataaagtgtataacactgatgagaccgacatggctgcatggcatgctttggtcgagaaatacggcaccgctaacaacccggagatcgttattcagcctaaggctgactccgctgaagtgacaccgaatgacaatcatcagcaaatcgatcaggaatggcgggcaatgaccgacattcaccagttcttccagttgctgaaacgtaacaacctgacgcgccagcaggctttccgcgccgtcggcgacgatttggcttatcaggtagataacagtgcgctggagcaaatcctgaacgcggctaaagaacaacaaaatgaaatcatgatctttgtcggcaacggcggctgcgtgcagatcttcaccggtcagattgaacgtgtcatgccacacattgagaaagaagcgcctttccaagaatggattaacgtttacaaccgtcgcttcaccctgcatttgattgccagcactattgccgaaagctgggtaacgcgaaaaccgactaaagacggtttcgttaccagtcttgaactgttcgccgcagatggcacccaaattgcgcaattatttggtcagcgcagcgaaggtcagccagagcagaaccaatggcgcgagcagattgccgcagtggcaaccaaggacatcgccgcatgaaaaactggcttctgacattaacattggcgctgccactgaccagtgtcgcggccgaccgcatcgttaccatcggtggcgatgtctctgaaattacctacgccttgggcgtaggttcaaaaatggtcgcccgcgacagtaccagcctgacccctgtagccattcgcagcctaccggacgtaggttatatgcgccaactcaatgccgaagggattctggcgatgcagccaacgctggtgcttgccagcgaactggctgaaccctctctggtgcttaaacagttgaccgacagcggcgtgaaagtggtcactattcccggtgataccacgccagaagccgtaccggaaaaaattgccctgatcgccactgcggtcaatcaggcagataaaggccagcagcttagccaaacttatctgcaaaaactggcctcggttaacactaccgccctgccggtcaaaatgctgtttgtgatgagccacggtggcgttgcgcctatggccgctggccagcagaccgctgcggacgcgatgattcgcgctgcgggtgcgcaaaatgccatgcagggttttaaccgctatcgcccgctgtcgcaggaaggcgtgatcgccagcgcaccggatttactattactgaccaccgatggcgtgaaatccctcggcggcctcgataaagtctggcggcttcccggcctgtccttaacgcctgccggtaaacacaagcgtgtgttgattctagatgatatggcgctgctgggctttggcctggaaacgcctaatgtgctgctcaagatacgcgcggcggcggagcagagtaaatgagacgatacttgccacccggttatgcgctgggcggcctgctgacgctattggttctactggctctgggttccgccaatatgggggctttaacgctgtcgtttcacacgctgtggaacagctcgctggacgacgcctcttggcagatttggctgaatattcgcttgcctcgcgtactgttggctatcgtggtgggttgtgcgctggcaacctcaggcgcagtgatgcaaggtttgttccgcaacccgctggccgatcccgggttactgggcatcagcagcggcgcggcgttgttcgtcgctatggttatcgttctgcctttcagtattcccagcgtactggctttttacgggcatattatcgccgcgtttatcggcagtgtgctaatttcgctgctgattttctccctcagccgctttggccacggcaatctgtcccgattgctgttggccggtatcgccattaacgcgttgtgcatggcggcaattggggttctcagctatctcagcagcgatcaacagttgcgtcaatttaccctatggatgatgggcagcctgagtcaggttcaatggccaaccttgctgatcgccgcttcgttagtgctgccagcctgcgctgccacgctattccaggcgcgcaaactcaatttgctgcaattaggtgacgaagaggcgcattatcttggcgttaacgttaatcgcactaagctattgctgttactcctcagcgcattactggtaggcgccgccgtggctttgagcggcgtaattggctttatcggtctggtgatccctcatctgattcggatgcgtttaggtgccgatcatcgctggctgcttcccggtgcggccttgggcggagcctgtctgctgctgaccgccgatactatcgcccgcactctggttgcgcctgcggaaatgccggtagggttgattaccagcctgatcggcggcccttacttcttgtggctggtattacgtcaaccggagcgcgcccgtggataattcagcgtactcatctcattcgaatcaaccgctattactggatgcgcaaagtctgtgtttctctttaggtggacgtcagctcattcaagacgtgtcattacagattcgcagcggcgaaatggtcgccattatcggccctaacggggcgggcaagtccacgctgatgcgattgctcaccggctatttacccgccagcagcggcgattgccatatgttaggcaaatcgctggccagttggccacagcagcaattggctaaaacccgggcagtgatgcgccaatacagcgacctgaaattcccgtttagcgtagaagaagtggtgacgatggggcggacgccccacggaaaactacaggagcacgaggcagtacaacaggttatggaacaaaccggctgtaccagcctggctaaacgcgattatcgccagctttccggcggtgaacagcagcgcgttcagctagcgcgcgtgctggcccagctctggcaacgcgcgccatcaccccgctgtttgttcctcgatgaacctacctcggcgctggatttacaccaccagcaacacagtttgcgtttgttgcggcagctcacgcaggaacaaccgttgtcggtatgttgtgtcctgcatgatctcaatttggctgcgctgtatgccgatcgaattttgctgctgcatcaaggccgattggtcgccgcaggtacgccgcaggacgtcctgcatactgacatactaacccgttggtatcaggcggatttaggcgtgtacagtcatcctgaaaatcagttgccacaggtttatttgcgacagtaatccccttcccgttatctaacctgcgcatatgattttcagaaactcatactgcgcaggttagcttagatattcgcaagccaacaccattccccgtatgtgttcagatgatttttaccacacgtttaaggggtaacgaattaaaacttaacggttaaaaccaaacgggtaacggtgtaaccgccgcgttgcagataaacaggcataaaaaaacggaggctaagcgctgccactttgtcctccgttcgactctcaaccggccatatttgaaatatccatattcgcggttcttctagctggagcaggatatctccagatgctttccccaatctggcggcaaagcggccagatcgtcatattcggcattatcagcaaatggccgttgcaacgccaaatgcagcctgtgcaacgcgctgatatcgtcattttctgccagctcaatcgcttgctgagccagataattacgtaagatcagcttaggattcactgacttcatcgcctgctgccgttgagcgtcatcaatagtttcttgctgtagccgcgtccgatattgcgaataccatttatcaaaggcatcccgatcgacaaagtcatcccgcagtggcgaatgagcggaagattgctccgtttcactgaggcgacggaacgtacgggtgtaatcctgtttttctttcatcatcagactcaataaaccagtcaacaaatcgttatcctgtttatcggtagtgaaaaaacccagtttggcgcgcatttgctgcccgtaggccgccatcaacgccggttcgtaggcatccaacgcctgctgtagctcttccgccatcagtaatccggatagagactgccccaaacgatgtaaattccagtaggccaccgccggttggttatcaaaagcatagcgtccctgatggtcggtatgattacaaatatagtccggctggtaatcatccagaaaaccgaacgggccataatccatggtgataccaagaattgacatattgtcggtattcattacaccgtgagcaaaacctaccgtttgccaggacgcaatcattctcgccgtgcgctctaccacgtcggtgaaccaagccagataaggcctggcttcgtcagctaaattcggccaatggcgggcaatgacgtaatcagccaattgtttaacctgtactggctgctggcgataatagaaatgttcgaaatgaccgaaacgaacatgactttccgccactcgcaacaacatcgcaccgcgctcaggctgctcacggaataccggattctcgctggtcacaatggttagtgcacgactgctggcaatccctaaatgatgcagcgcttcagaggccagaaactcacgcactaccgagcgcaacaccgcccgcccatctcccatgcgcgaataaggcgtcagccccgcgcctttcaggtgccaatccagctgacgaccatcgctcagttgctgttcaccgagcaaaatcccccgaccatcacccagttgtcccgcccatacgccgaactgatgaccgctatatacctgagccagcggatccattcccggcagcaattgttccccggcccaaaccttggctttatcaccggagaaccaactgtcatccagctcaagttctgctgccagcgatgcgctgtgatacagcaaacgcgcgccttttaacggtgttggccgcaaacgggtataaaatccgggcaacgcccggccatagctgttatcaaaatccggcattacatcagttcctcaaccagccaacggcgtagttcaactaattcagcctgtgaatcagggaaatcagcgatcagcgtctgacatagggcgtccaccgcttcaggacgataagctacacccggtaaccgttcggccaatgtttccagcggggttggattcaggctatcggtaaatacttggctgcgttcgatagaacctcgcaatacatctaaatgcacttcaacaccgccccactgaaaacgagtgtccatttgatgattaaaggctggcgcctggccaaaattccattcccagctactttggcgggcaaactgctcgctaaagccgggtaaatccggcaaggctagtggagaaataatttctgcctgcgcccgttcgtcgtagtaatcaaagtaggattgctctatggctctgcaaatctgctcatgatcgatacccggtatcagctcgaccagattggcgacccgcgaccgaaccgaagcaatgcctttcgcctgtagtttcttaggatcgggattaagataatcaaccagacgccctaaattggcgtttatcaataaggtaccatgatggaagccgcgatctttggtttcccgataagcagagccagaaactttacgctcgccaccttccgtgacaacgaccagatcattacgaccagaagccgtggcgtcgatccccaatgtcttgagggcattaagaataatttgagtggaaaccgttttatcgtattcaggtttgcctgccataaaggtaaagcaggtgttgcccaaatcgtggaataccgccccaccgccgctgctgcgacgcgccagtttaataccgtcttcagccatacgccgcgtattacactctttccacggattctgagcgcgaccaatgacaatggtattatcgtttcgccagagaaaaagtacccgctgatccggcgacatttggcggaaaatacagtcctctacagccagattaaaccaaggatcataggaatcagaaatgaataaacgaagggatggcataaagggctccgcaccaaaataaacagccgttaagataacacagttgcggctgtttatcggcggttagatgcggcgcgcctgccagtaaacgcgtttccagtacacgttttctaacgaagaacggatgacgcctttactggtggatgcgtgaatgaattcatcattagtatcgtaaataccaacgtgcaatccattccctccactgcccgttttgaagaacactaaatctcccggcatcagctcatcgcgagagactttggtacccagactggtttgtgcttcagtggttcggggcaactgcatatcaaaacgatcgcggaaagtgcgatagacaaagccggagcaatcgacgccgcgctggtccattccgccatattggtaaggcgtaccctgccattgacgcaattgctcttttaactgtgcgaccaccacaatcgggtcagataggtgtccgctgggtgccggagctctgctactacacccggcaagaataagacaggccagaaaaatccaaaaacgcatccgcatagatctctcaccgaataataagcccggttggctttccttgagcggaaaccataagaaaaccaagctatcatgctgaattcatctggctaatctatatttcgtgcgcgcaaaaaacaagttatctgaataagataatagtgctaaagctatttaatcggcttcgaatgtattaaccaaacgccaaacaggataatggcggctcccagggtctttaataacgtggcgctttcgtggaaccaaggcaaagtcaccgccgccagataaaccagcgcataactaatacttaagagtggataagcctgatttaatggcaaataacgcaaagcgaagaaccagcacagcatcgaaagcgcatagccgaataaacccgcagtgacggcggcaagtggcgacagatgatcggtgaagaattgcagatccatgccagcccagctaatcagcggtaagtgaatcacaccccatttcagtaatagctgcgccaacgtcaccaacagcacgctacctattccccaaccgtaacctttcatcgcggcaaactcatcagcaaaatacccaacataatggcgacaatacctagccaatggcgcaagccaacggcttcaccgaagaaaaagcgtgatgccagcgtaaccaagacaaaattaaaactgagcatagggtaagcgatgcttaaaggcaggtgttgcagcagccgaagccacagcaacatccccaatccgagcaacagcaccgccgtagctagccacctaaaggtgtgagtacgacggctcggttgttctgtagcccaaatctgagccgcctgcttttgacatagctgtccggcgcaggtcagcagactcaccatcaataacagcaggtaactcatcatggaatttgcttataccacagcaacgccattctgctgttttgcgtaacctgatccgccgcaggcaggctttctggcaaggtttcacctcgggataactgtaagaccagcgaaacattcccctgtttacgcgccttagccagccattgagggaaatcttcaaaactgacgtaacgatccgccgcatccggataggctaaaccataattcacttcgcctttttcgctaaacataatgatatcactacgtttcaactcccaggccagacccgaagccacgccgacgccatccgagagtacgtagcggctttgttcaagctccgcgcggttctgctggataaaatactgaggcagcttggagttaatcacctgttgcggaatgacatacgccaccagcaacgcaaacagcagcgggcaaacggccgcccagcgccaatggcgagcattttgtcgcaggctgaaatagccaacgcatccccatgcagcaaatgacagagtcccgagaatcactttgattttctcatcggcggcgtacaccaccaggtgagaaaatacgcccaaaccgatcaacagtacggccaacgcgcagacggtgccgaaaatcagattgatatagccgtttaccttcagcgcgctcatctgcaatttagccacacaatcctgcgcgtacgctgccataagcaatgatatcggcgcaatacacggcagaatataggttggcaattttcctttggcgatgctgaaaaatataaacggcatcactgcccagctcagcaggaagaagagttccggtcgagccactcgctcacgccagcctttgagtaatgcccccggcaacagtcctaaccaaggtaatacgcccagacaaatcagcggtaggtaataccagaatggcgctttatgctgcgcgtctttctcggcaaagcgctgaatatgctccacccagaagaaataatgccagaaatcaggttcacgctgcgcaatcgctaacgcccaaggcaggctcagcaaacaggcactgacgatagctatcgggccaaacaacagtagctctttggttcgacgttgttgaattacaatgggaataaccgcaatcaccggaacggccaatgccaaaaagcccttggtcataaagcccatggcacaaaccagccccaaaaatgcataggcggtcattttctgtcgggaagttttggctctcagcgtcagataaaaacacagcatcgatgctgtcagccacagcgtaatcataggatcgagaacgctataagtcccgatactgaataccagcagcgaagagatataaatcaggctagccagcagcgcggtattacgattacgccacattaatgtcgctagccaaaataccaaaatggcgctgagtccaatactgaatactgaaccaaaacgcaccgcaaagttattatcaccgaagatccactggctgatattattaaaccaatatccggcaataggcttttcaaaataacgaatacccaataaatgcggcacgacccaatcaccctgctgtagcatttctcggctaatttccgcataacgggtttcatccggttgccacagtaaacggccgttcaagggcacgatatataacacagcaaaaaataccgccagtagcgctacgccacccttttttaacgcgtcgctcatgaatttgtcacctcagactgacagcctaaccacccctctctgcctgggaaagcagaacgcacgaccttgcctagcggcaagtttgaacgattttccggtaacaatgagcttaaagcgcaaaattcaattccctgcttctgcgctttcactaatagattttcaaacatcgctgcctgtgacatcccttcaacttcggcgtgaatggtataaaccggcactccgctatctcgcagaatggcatccagaataaaatcgttaaaatcctgcggacgaacttcactgccgacgacttcatcgtaagtcggtaatgtcacggggatttgtacgctgccttcactgccatcaggcaatattggccggaaaggacgcgtgccgcggcaatcgctgttatagctgaagttaaacggctgtttcgcttctaatactcgctcgtcggcgcgccacccggcgaccgcagagcaactaaccggcccgtggatactgtcttgcaatgcatccacaccacgctgaatctgatctttgagctgtgctttcgaccaggtgccgactttcgcctgccagccctgatgatcccaagcgtgcaagccaacttcatgaccggcagcctgcgtttctttcatcacgtcgcctaaatgtttggcaattaacttgcccggccaggcggtaccggccagcagaatctgccagccgtacagcgaagctgcgtttgagcgcaacattttccataagaaacggggacgtagcaggcgccataaatggcgccccatgttgtccggcccaacgctaaaaaagaaactggcctgaataccgtgtttatctaacacattcaacagtgaaggcaccccatcgcgggtgccacggtaagtatcgacgtcaatcctcaggcccactcgtttcatttagccttcccatcatcctgttcaatggatttatcgtccagcgcgctgcgcaggaagaagtccaacgtttcggcgacagtttgctgcatggcgatttcaggctgccagttcagcaaacggcgggcgttttcaatgctcggcgtacgatgttcaacgtcctgataccctttgccatagtaagcgctgctttcgatggttttcatgccagcaaacggcgggaatttgtcgcgcaattcatgtttctcaaagctggccaacagcatttcagccagttcacgaatgctggcttcgttagtcgggttaccgatattgataatctgaccgtcgcaacgtccttcgcggttttcaatgatgcggaataaagcttcaataccgtcgttaatatcagtaaaggtacgtttttgttccccaccgtcaaccagtttgatcggcgaaccttccaccagattcaatatcaactgagtaatggcacgggaactaccgatacgagcagcatccagattatccaaacgcggccccatccagttaaacggacggaataaggtaaatttcagaccttctttttcgccgtatgcccaaataactcgatccaataattgcttggagacagaataaatccagcgctgtttattaatcggcccgacaatcagacgagaatggtcttcatcaaactctttgtcatcgcacataccgtaaacttcagaggtcgacggaaaaacaatacgtttgttgtacttcacgcagtcacgcacgattttgaggttctcttcaaaatccagttcaaagactttcagcggattacgggtatattcaatcggcgtggcaatagcgaccagcggtaatatcacatcgcacttcttaatatgatattcaatccattccgagtgaatactgatatcaccttcaacaaaatggaagcgtggattatccataaagcgacccagcgcatcggaaccgatatccagtccgtaaacttcgtagccgtcatcacgtaataaacgttcagtcagatggttaccgataaatccattgacgcccaaaatcaggactcgggtgcgtcttttctttttatttagcggtttaacccctaaacggacatcggctaccatccccatttccaatgccagacggctgccctgcacgtacagtccggattcgccctgaccggcgatgatttcaagcgcgccctcaccgcaggctaccaccaatggattggtgccaagtacggttcctggcaatttttggtgctcgatgtccagtggcctggcacgccatacaatcaacttgcgctgtcccaaatggctgaatgcgcctgggtaaggttctgtcaccgcgcgtaccagattatgtaattcgcgagcggatttaacccaatcgatttcgccatcggcggcggtacggcgaccaaaatagctggcgtccgcttcattctgaggcgttagtgttaacgggccacgcttcatttttggcaataaatcctgcaacagagcctgcgcggcatcgcgcatttttgcatgtaaggttaaagccgtatccgtatcgctgatagccactttacgctgacctgcgatgtcgcccgcatccgctcgcttcaccattttgtgcaaggttacgccagtttcggtttcacctttgaccaacgcccagttaatcggcgcgcgaccgcggtagcgaggtaacaatgaaccgtgcaggttaaatgcgccctgcggagccagagataaaatctcatcgctcaacaagttacgataatagaatgaaaaaatgacgtccggctgcatttcgcggatctgctcaacccataaaggatggttgacgtcttcgggggcaaacaccggcaattgtagatcggcggcaacccgcgcaacggaagagaaaaagtgattctcattcggagaatcagtatgggtaaacactgcctgaacgtcataacccgcttcaaccagtgcattaacgcccacgcagccaatatcgtgataggcaaatacaatcgctttcatcattcttcttcctgagtttttttggcctgctgagactcgaccactttttgcacaaaatatcggggacgcgcgcgtacgtcgttgtaaattcgtccgatgtattcaccgagtaaacccataccaacgaattgtgccccaataaacataaataacaccgcgaacagcgtgaacacgccgccgccagcccattccgggccaaaaatcaaacgtaatgccaccagcagtaccgagagggtgaaacctgacagtgcaatgacgctgccaaccagactgagcaaacgcaacggcgtagttgtcaggcaggtgatcaggtcgtacatcaggttaatcagcttcatcagactgtatttggagtcgccaaactcgcgctcggcgtgatgaaccttaatttctgtggtttttctggcaaaggtgttggcgagtatcggaataaaagtactgcgctcgtgacagtgtaacatcgcgtcaacgatatgccgacggtaggcacgtagcatacagccgtagtcccccatcgatttccctgtcgctttttggatcatcatgttgatcatcttggaggccgttttacggaacatagaatcctgacggttggcacgcactgtaccgaccacgtcataaccctcttcggcaacgctcactaaacggggaatttcttccggcgggttttgcaaatccgcatctaacgtaataaccagatcgccactgacctgattaaaacccgccataatggcagagtgctggccataattacggtttagcaagacggcaataatgcagctatccggtttttctgccgcagcggttagcatttctgccgaattatcgctgctgccgtcatccaccaaaataatttcataaggctggcgtaataactggcaggcagccgaggttctctccaataatgcgggtaaactttcctgttcgttataaacaggaataacaatcgagactttattaatttcttcaggctgtgacacggcgaggccctataatagttgctaatgcgttgaccacccggtcaacatcgctatcttgcatatcggggaacagaggcaaagtacaaagccgggctgaattccactcggtatttggcaaagttaaatcgggataacgttcgcgataatatttttgcgtatgagccgcacggaaatgcaaaccagagccaatgcccaaggcttttaattcagccataagttgatctcggcttataccgcactgctcggaatctacccgaaccataaataggtgccaggcgtgatgatgaggataatcaggcaatgccaaaggttgtaacggtgaacctgccaatgcctgaatataacgttcagccaaagcctgacggcgagcgtttatttccggtagccgtttcagttgcaccacagcaatagccgcgtgaatatcggataaattatatttatatcccggttcgaccacttctgcctgcgggctacgcccttttaactcacggtcaaaagcatcaacgcctaatccatgaaattttaagcgacgtactttttcagccagcacgtcatcatcggttgcgattaatccgccctcggcgcaggtcatattcttaatcgcatggaaagagaaaatcgccgttccttgctgccctatccattcatcgccgtagcgtgttcctgccgcatgcgccgcatcttcaatcagcggaatctgatgctgacgggcaacttgcctaatgctgtttaaatcacagggcgcgccagcataatgcaccggaataatcgccttggttttaggggtgatagcagcggcaatactttcagcgctagccatcagcgtgttccagtcaacatcgaccatcaccggaacggcacccaataactcaatcatattaagggtagaaacccaggtttgagaaggcgttatcacctcatcgcccggcccaacgcccagtgccattaaagtaatatgcattcccgccgtggcagaacagaccgctacggcatgtttgcagccaaaagcctggcaaaactcgcgttctaattgttgattcttcggtccggtggtaatccaccctgatgtcagaacttctgtaacagcagcaatttcttcactgccaatagcaggaacagagaaaggtaagaaattttccatgaatgtacccagtaggacacaacaaatttaacgccactataagtcgaagtaagttaacgaaaactaaacgcggccacgattgatctcactgcacaccactgataaatgtagacaatgaaccttaatccaaccttaagaacaggagaaaaaaacattattttgtggcgtgtgcacaaaatttagccagagttggcttaatgtaaatattctgatgaatcaagagaataaacttcattttttttgcgacacaacagcagacgaaggtgaatgtttaccgatttacgctcagtttcagtatagaaataaccgaaactcagaaataatcataatcgtataatttataaaaatagtttagctaaaataattaatttttgagtgacgtgcagggttaatcgaatgatcctatctccgtcattcattgcagtatcgcgttatttagagataagaagtaaagatggcgtgaattaagggacagaaaatagagaaaaagtctgttcaacatcggattaacgcaaaatgtataggagcagcaatggcacttctcccccatcatctgccaataacgatccgtttgaatgcgttttcactacaaatcaaaatatcaatgaacagccagaattaacgctggctgttcctatttcacttgaaatttcatgttacttactacatatgactaattttacaaaggtagacgtgcctctgtatgttaagtgataagctgactttttaaacgatgcccgttactgattttatcaaaaacgcccccaatctcgtactcgttatgggataaattcttcgcctgacgaatcacgtcgttataagttatcttcgttcctttgatattaactccatactcggttttttgagcttcaactaaaaatcttttaacctgatgtggatgtaaataggcagagaagcgaccaaatgttacacactggccttttttatccataccaaacacacgatttttttcgcttgcaagacccaatccaatatttaaataatcagtatttccaattagtttacccaccataccagcctcctcataacaacatgaaaaaaaagatatttacagaggaaaatcaagacctattcgttcaatacacgcatctgaaataaaccgttccattatggataacaaacttggtatatccattccatatagcgggagacgtagccaacagatcacatcatttttttcatcaaaggcaaaaaccggctgccataaataatctgttggcctatttttattcaacagagcaatcatttcctctaacgataaactgttcgccatacctactgaggtctgaagtatccaatattcttgatctatcgcgcatagattcaattgcaaagcatcatcgattgtcaacgtaatgatatcttgattttcagctatctcgggagcttcaaatcctatagcaaccaacaattcataagtaataagatgaaattgccttaaatggctcaccggtagcagccctcttgagaaaatttgacggagtgaccccttactaagcaataattgcattaaacatagaatccaatctataaaatatcggtactaccattgagttattatagtgaattaagtggaaaaattgagttaacctcgcctaataatggctaggttaacttcatttatatacgatataaaaattagggagtaattaataaccagaatagttaatgcaataattattaattctgacaaacaatccaattctgctgattaaaacggtgtaattgaaaattcacctcaaaaatcggtgataatatctctggtcgcatcacttccagcgtttcaccctgcgcaaccagttttccctgcgccagtagccagattctgtcggcctgttgcaggctatgattcagatcgtgagcgctgacaataacactgcgaccgctggcgcaaaactcccgtaacagcgcatctaacgcaactttttgcgccacatcaaggctattggttggctcatccagtagtaataattggctatgatgattcaccgttggccatacctgtaacaaaatagccgccagcctgacccgctgccattctccgccggaaagttgagtgagagaacgcggcagcttatcggctaaacgtaatttttcacagagataaccgatggctatcgccacggattccgaatccgcccctacgggctgatgcagagagaggtattgaaatactggcatcaggctaaccgacgtttgctgctgactgagataagcccgataccgtgctaattcagcgccggaatactgcgtaagaggcgttgcgagcagagaaatatcccccgtagtcggtaatacacccgcggcgcaggctagcaaggtgctcttccccgcaccgttcggtccaataagatgaatttgcaacccagcatcaacctgcgctgaaaacgaggctaatcggcccgcgacactgacatcgttgagttgcaataacgtcacaataatctcgttagctaataagttaagtgaaaatcagtgctgagccagcgcctgaacgatcgcggcaatgattgccggatcttctggcgtcatatccggtgagaaacgctgaataaccgtaccgtcccggccaatcaaaaatttttcgaagttccacaatatatcgccgatctgttttggtgctcgccccttactgctcatccgctggaaaaactcgctgtccgcaggcgtcaaagcctgtggcttagcggaaattaagtgttgatacaacggatgacggcctgagccattaacttcgactttactgaacatggggaattctacgccaaaggtgccccggcaaaatgcctgaatctcttcatcgctgcctggctcctgaccggcaaactcattgctcggaaatcctaaaacttcaaaaccttgttgatgataggttttgtacagtttttccagacctgcgtattgtttggtcagtccgcactcggaggcaacgttcaccaccagcagcacggagccttgataggccttcagcgacgtcgtttgatgatcgatagtgtgtagttgagtagcataaatcggagcggtcatcggatgtcatccttattatagagagtgaaacttttattatagagagctaaacttttaccgagttaaccctgagcgatattgatgcaaagtcctcttaaagcgactattagcaggttttccgttcacgactctacgcttttcaccctaatcagtaaccagataaatagcggagctcccagcgttgccgtcaccacgccaatcggcaattctgcggaaaacaaggcaacacgagcaatcacatcggctaacagtagcactcccgccccggccaaagcgcagcctgttaacaggaatcgctgatcggtcagcccggttaatcgcaaaatatgtgggattaccagaccgacaaagccaatcacaccggctaatgcaacgctgatgcctaccagcagaccaatagccaaaaccaatagattacgccacctatggagtgagaccccaagctgtcgcgcctgctgctctcccagcgccatatagttcaggattctaccttgcaggcaaagccaaatcaccactggcaataacagcaacaccagcaaccactgccgccaatctatcccgctaaaaccgcccatcatccaatacatcagctgacgtagatccagactggtactgaaataaaccgcccacgtcatcacagcactgcatacaatccccaaagctacgccaaccagcagcaatctggcattgcttaaacgtcggcgtcgggcaaaagccagcagcagcgaggtcatgaccaacgcgccgataattgcactcagactcagcacccacaccggcagcaatccgtgccctaataaaaccgccagcaccagcgtaacgccagctccgttcgccacgcctaacaatcccggctcggccagtggattttcgaacaggctttgcattatggctcccgctaccgccagactggcaccaaccatcattacggctaatgctctaggtaaacgcagttgccatacaaataattgtccatcggcgcttagccaccgattgggccatatccaaacctcccctgcgcaaagagcaagtgacagagccagtaacataccgcaggcgaggagtccgagataacgacgatcccgccgcagctgatgctgctggagtaagataaatgtctgacttatctgcataatattctgcaatccggctgacagaacatgactgggaaaacaggatcatgatccgagatagaaaaaggcttattgcctgggtttgaggacagatattagggggttagcaggataagtgaaagttttgcgtagcaagggcaaggattttattcgtaaatacattaattggcatcttcctatatgagagacacggcagcaaagcgtagaaactcattagcgagttcggcgagaataaaacgaacgcggaagacggggcggaagcagagaaaatcgcgtttctggctatgctagctataagattacaaaagaaaaaggccgcttgcgcggccttttttgtcggattactcactctttgggagtggcattctctacccggctttttagcttctgcccaggacggaaagtcaccacacggcgcgccgtaataggaatgtcctcaccggtcttcggattacggcccggacgttggtttttgtctcgcagatcaaaattgccaaagccagacaatttgacctgttcgccattctccagagcacgacgtacctcttcaaagaataactctaccaggtctttggcatcccgtttgctaagcccaagcttttcaaacagatgttctgacatttcagctttagtaagcgccataggttcaatccctcaaggatgcttggaatcgctgttttaacgcctctacacattttgcaacggtagcggcgatctcctcttcttccagtgtacgggcggtatcctgcaacaccagactgatagcgaggcttttataaccctcggctacgcccttgccacggtacacatcaaacaagtttacgccaactacctgatttgcgccaactttcttacactcggccaaaatatcttctgcgggaacgttttcagccaccacaacagcgatatctcgacggtttgccgggaagcgcgaaatctcgctggcctgaggcacggcgcggtctgcgaccttattccacaacaattcgaacaccacagttcggccgttcagatcgagcttacgctccagttcaggatgaactacaccaatgaaaccaatgtgttctcccgctaaataaattgcggcactttgacccggatgcagtgcggaatgcgattctgcacggaactgaacgtcagataatttgccggtaagttcaagaattgcttccaaatcacccttcaaatcatagaagtccaccggctgacgcgccaaatcccaatgctcatcataacggttaccggcaatcacacccgctagcattacgtcctgtcgaatacccaaatctgctttattatcaggaacaaagcgtaagccactctcaaacaaacgcagacgagattgctgacgattctggttataaaccactgctgctagcagaccagtcagcaaagacaagcgcattgctgacatatccacggaaatgggacttggcaaaatcagaggctcttgacccggatgcaataaagcctggatttttggatcaacaaaactgtaagtaattgcttcctgatagccgcgatcgaccaataatgccttcacacgcttcaatggcaggtcagcttcgcgatgtttggtcatcaccaaatctgcttttaccggcacatcagggatattgttgtaaccgtaaatacgggcaacttcttccaccaggtcttcttcgatttccatatcgaaacgccagctcggcgcaactgcctgccagttatcacactgcacagtcacctggcaacccaaacgacgcaggatatcggtaacctgttcacttggcacatggtggccaatcaggcgatccagtttttcacgacgcagagtaatagtggcgcgtttcggcaaatccgcttctgaagtgacatcaataatcgggccagcttcaccgccgcaaatatcaatcagcaaacgggttgctcgttccatcgccttatgttgcaacgcagggtcgacaccacgctcataacgatgtgaagcatcagtatgcaaaccttgacggcgcgctcgcccggtgatcgacaacggattgaagaaagcacattccagcaagacgttctgggttgcttcattcacgcctgaatgttcaccaccaaaaataccggccatagctagcgctttctgcttatcggcgataaccagcgtatctgcgctcagtttggctttagtaccgtccagcagcgtcagctcttccgcttctgcggccatacgaacaatgatttcaccgtcgatacgatccacgtcaaacgcatgcatcggctggcccagttctaacaatacgtagttagttacatcaacaaccggatcgatagagcggataccacaacgacgcagtttttcacgcatccacagcggcgtagcggccttaacgttaatccccttcactacgcgtcccagataacgtggacacgcctgcggcgcatcaacgcgaattgggaaggtatcgctgagggttgcagcaaccgggctcatatccggttcggtcagagctaactgattcactaccgcgacatcgcgagcgacacctagaatacacagacagtcggcacgatttggcgtcacgctgatttcgatagttttatcatttagttgcagatattcgcggatgtcggtgccaattggcgcatccagcggcaactcgataattccgtcgtgatcgtcagaaatacccagttcagagaatgagcacagcatcccttccgaaggttcaccacgcagtttcgcagccttaatcttgaaattacccggtaaaaccgcgcccacggtcgctacggcaaccttcagcccttgacgacagttaggtgcaccgcagacgatatctagcagacgatcgccgccgacattgattttcgttactcgcagtttgtctgcgttgggatgctgcccgcactccacaacttcaccaacgaccacgccgtggaatgcaccagcaacgtcatcaacgccgtcaacttccagtccggccatggtgatttggtgggctaattcgtcactgccaatggttgggtttacccattcgcgtaaccaaagttcactgaatttcatgagatatacccgccttacttaaactgtttgaggaaacgcagatcgttttcgaagaatgcacgcaggtcggtcacgccgtaacgcagcatggttaaacgctccatgcccatcccgaatgcaaagccggagtagatctctggatcaataccgacgttacgcaatacgttagggtgaaccataccgcagcctaatacttccagccatttaccgtttttacccatcacatccacttcggcagaaggttcggtgaacgggaaataggaaggacggaagcggatctgtagatcttcctcaaagaagttttgcaggaaatcatgcaaagtacctttcagattggtaaagctgatatcgcggtcgacaatcaaaccttccatctgatggaacataggagtgtgcgtttggtcgtagtcattacgataaacccggccaggaacaataatacggattggcggctgctggccctgcatggtacgaatctgcacacctgaagtctgggtacgcaacaaacgcgttgcatcgaaccagaaggtatcatgatcggcacgcgccggatgatgagccggaatattcagcgcatcaaaattatgatagtcatcttcgatttccgggcctgacgccacggagaagcccagctcaccaaagaaggtttcgatgcgatcgatggtacgggtaaccggatgcaggcccccgttttccattcggcggccaggcagcgagacatcgatagtttcttgagccaaccgcgcgttcagaaccgctgattccagcagttccttgcgcgcattcaacgcttcctgaacctcttgttttgcctgattaatcacggcacctgctgctgggcgatcttcggctggcagctcacgtagcgacgtcatttggagggtcaaatggccttttttgcctagatattcgacgcgcaccaaatccaacgcggcaacatcctgggcctcttctacggctgctttagctctggcaaccagctctgcgagatgtggcattgttttcctcttcctctggccggtatggcccgcttgtagttattaaactgctatttaaaccgctggataaaactgttttgtgtaaaattcgctctattgcgccctgtcctacaacggccaagacgttatcgaacaacaagatattgatcttctggcacatattttactgcgtgctgccagaattggaaaccttggttcaataggatcaaacacatacttgagttatagaaacaaaaaagcctccacggtgggaggcttcggcgctacttttcgtttcttttcttacgcgcaagcctcctaaaatcaggtgctaaagtaaaaaaagaaacggaaaataactgattgcatcattatctagccttacgaataacaaaacgctgttgaacgataaatctgttgactgattagttatcctgacaaaatttgccaaggttacaaagatcaaaagagggagcaagctccctctttcattctgacttacgccagagctgctttcgctttttctaccagagcggcaaatgccactttgtcgaatactgcgatgtcagcaaggatcttacggtcgatttcaacagaagcctttttcagaccattgatgaaacggctgtaagacagaccgctctgacgagcagctgcgttaatacgtgcaatccacagttggcggaattgacgcttccgttgacggcggtcacggtaggcgtattggcctgccttgatcactgcctggaatgcaacacgataaacgcgcgaacgggcaccgtagtaacctttcgcctgctttaaaatctttttgtgacgtgcacgtgctaccacaccacgttttacgcgagccatgtacttctcctatcgtcttaattcaaaccaaaaatacttatgcgtacggcagacatgccacgaccagacccagatcgttcttagataccaggcctttaggacgtaaatgacgtttacgcttagtagcttttttggtcaaaatatgacgcaggttagcatgcttacgcttaaaaccaccgttggcggtctttttgaagcgcttagcggcgccgcgtactgtcttaatctttggcattgaatatatccacttcgcattgttaattacaacgagctagctaggcgaacaggatcatagcgcacaaggtgccatgaaacctgttacttgaatgccttactgtctcttcttaggtgcgagcaccatgatcatctgacggccttcgatacgagtcgggaaggactcgacaacggccagatcagaatcttcacacaggtctttacggacgcggttaagcacttccataccgatctgctggtgcgccatttcacgcccacggaaccgcagggtgattttggctttatcgccatcttccagaaagcgaatcaggttgcgtagtttgacctgatagtcgccatcatcggtaccaggacggaatttgatttccttgacctgaataactttttgcttcttcttctgttctttcgtcgatttgctcttctcgtagaggaacttgccgtaatccataatacggcaaaccggcggctcggcattcggactgatttctactaaatcaacaccagcttcctcggctttttcaagagcttcattcagactgacaatgccaatctgctcaccatcaacgcctgttaagcgaacttctgtggcgcgaatctctttgttaatgcgattaggacgcgccggttgaactcgttttccgcctttaatactttattcctccagttgatgaagactacggctgcgaatctctgttagcagcttgtctacgaccacgttgacatccacgcttcccaagtctttaccgcgacgagtacgaacggcaactttgcctgattcgatctctttatcgccgcaaaccaacatatagggaacccgacgcaacgtatgttcacgaattttaaagccaatcttctcgtttctcaagtccgctttcaccctaatccctgcatcttgcagttttttggttacttcttggacatattcagcttggctatcagtgatattcatcactacaacttgtaccggagcaatccaggtagggaagaagccggcatattcttcggttaaaataccgatgaagcgctccattgaccctaaaattgcccggtgaatcataaccggaacctggcgatcgttgttttcgccgatgtaagacgcacttaagcgacccggtaatgagaaatcgagctgtacggtaccacactgccacgcacgatccaaacaatcatgcagagtaaactcaatttttggcccgtagaacgccccttcacccggctgataatcaaacggaataccattttcagtcagcgcggcggccaaatcttcttcagcccgagtccagagttcgtcgctaccgatacgtttttctgggcgagtagacagtttcaccacgattttttcaaagccgaaggtgctgtacatatcgtacaccatcttaatacagctatttacttcatcgcgaacctgttcttcagtacagaaaacgtgagcatcgtcctgagtaaagccacgcacgcgcatcaggccatgcaaagcaccggacggttcgttacggtgacagctaccaaattctgccatacgcagcggcaggtcacggtaagatttcaacccttggttgaagatctgtacgtgccctgggcagttcattggcttaatgcagtactcgcggttttccgatgaagtggtaaacatatgctcagcatagttttcccagtgaccggttttttcccacagtacgcggtccatcatgaatgggcctttaacttcctgatattgatactctttgagcttcatccgcacaaaggtttccagctcgcggaagatagtccaaccgtcgttatgccagaacaccataccaggcgcttcttcctgcatgtggtagaggtcaagctgtttgccgattttacggtggtcacgcttggcggcctcctccagacgctgcaaataggcgtttagctgctttttatcaccccacgcggtgccgtagatgcgctgcaacattttatttttgctatcgccgcgccagtaggcaccggaggttttttgcaatttaaaatgatggcagaagcgcatgttcggtacatgtggaccacggcacatatcgacatattcttcatgatgatacagtccagggcgatcgtcgcggctgatattctcatcgagaatcgccactttatattcttcaccacgggctgcaaaaatatcgcgagcttcctgccagctcactttcttcttgatcacatcataatctttgtcagcgagctcatgcatccgcttttccagcagatccaggtcttcctgcgtcagggtctgttccaaatcgacgtcataatagaaaccgttgtcgatagtcggaccaatcgccattttggtgtttggccacagctgcttgatagcatgtcccaacaaatgcgcacaggaatggcggagaatttccagcccttcggcgtctttggtggtaataatggctaattgcgcatcggattcgatcagatcggtggcatccaccaactcaccgtttacacggccagcgatacaggcttttgctaacccggggccgatatccatagcgacatcaagcacagaaacagctttgtcaaaatgacgttggctgccatcaggaagggtaattacgggcattctaattccttatttacagtggtgacccacacgacagatcacatgtaatatacaattattgtttgaattcaaagagttgcattcgcaatttaacccacgcttgttaaattggtacgcaacttggtacacatatcgttttgtgtcttctaactcgccacgaaatgagtaaccatattatcactactggatacaatgataaacacgcccttacctgccgaaaccagtatggtttttataaaagcacaaactcagatttaaggctggccaaaatcgaccagcacaagccagatccaaccggcgtccctgccaataaaaaattctaatccggcattgctggccactctatgcttttaccagtcgatatatccaatctcattaaagagattcgatactccttccattttgccaaatcatttgcttccgtcccttcaggcgaaccgctgtcaaccgcatcctgacgccattcaatttcactatcagctttggcctttagcgccgatctctgactagttgcctcagctagaacttcctctggcgtcatctctggtgcatcgacccaggctggtctgccctttaccgtccccaatagttttctttgtggtgcggcagtggcgtgatatatagtcatctcatcgtcagtggggatgattaagtctgagtctttaatttcaccgtagctaccatcatcgaccatattttttgccaaaaaccggcttgtctttttattaaataaatatgacatcacaacctcgttatttagtagccaaaagcaacccagaataaatccacaaccacagtatcagccgcattaacctcaaatgttgtgctggtgacgttcctcacggtttggtttgcctgagcaccagtggcggcagcactataatttcgagtggtaatgactgaaccggtataattggggaatgcagttggaaaggtgaccgtggagaatgatgttccagtagctaggcctgttgccttgccccactggataattaacccgcccggacggtctggtatcctgatgaaactattaccagtgaagtttatttttccaaaaagaatcattagccccggcaacgtgagaaccttatctgccgtaccgacggggatttctgccgaggttgctacgtcacgtgtggatgaattacccaatcctaagttaaccctggactggggtttgtccgaaaggtcattcagattttgcgtcttttgaagggctccagtaatgcgcgtgtcattgccggcggccacggtattagccgcactccccacatctaatgttgaagaatttccgaggcctaagttattcctagcggtagccgcgttagtcacatccgacaagttttttgattgagctagcgcataggataccagccctggaagagtaacaaccttgtctgctgtgccgatcggatagtcggatacaagcgccacatcccttgtggatgagttgccaagaccaagattggtccttgatgctggcttgctcgccaagtcagaaaggttggcgcttttcttcagagcatcagcagcggcggcagcggcctctgttaagccaaggttagctacagcagcagccacagctgcaggtccagcggttgctatttctgatagattgctagccgtctttaaatatccggttgataagttaaaccagttggtaggagtggtatttgggttggatttattaccattaagcctgtttataaatatggtctcagcatcattaccaagtattaccgcaccctttggatatccaccaattccttcattaaaatcagcgtcaaatgtatttaaagctccggcactgaaccatcttaataaattcgaaagttcataaagaatttggttcatatcttggcctttaggcggtaatccgccagcagcctttaaaaccatggttattggcgggaatcccttctcgtatgacgctgaattatcaccggatggagtgtcaggaataatggcctctctctggccattaattccaaatgggactggttgtttttttggttcgtcatttctgttcatttatatttctctgaaaaatgttccgtcgttaaatggatatgcgtcagatgaaaatccgaagtatggcggaactatttgatgtgtagtaataagaaccgcgcttggtatcggtaatacctcataattctcaagaattgacacttcatatggggctaaataaaattcacaaataacccccatcctcatatctccgtaatcaacgcaaaatgccctccctctacctttaaaaagtatggaaaggaatttatttatctctttaatagtcgcaatgcttatgttcgaaaatgccttacatagaatgagtgtcctgtatgcatcatccgacagccttactgtctcagtttcctgtactccggcatagaatggctcttcattgaatggcgaagggtatgacccgccgtcattggcctcagagaacccaaaactattggtatctattgacgccttaatatatctggatacattcactatcttcccccacacatcaagaccaaaagatccgcatgtgtttacgttccacacctctttaataaactcatcggtgaattcatctaaattcacagcctgattaaatgtatcgattatggaaaggagcttttcacttgctgaatattgagttagtaccgtgtctttccagctcacattagtgttacctcaatgtctgcctgttgaattgtaggtatctgatcaatacctgccgttagtgactgggaaaaatcaacaccatttcctgaaatagatattgaggatatattcacgtaatcaggggagatagatattatcggtgcgtaatacgttcctgagttaattctcccgccaattcttgcttttgttataccgtcatacccaccattaaacacggtttccaccatagacttaatttggctgcttatgtctgatggaagattttcattagtctctatttcaaccttaaaataaattcttaacggcgtagctttttgccactgtataatgtactgcgggtagggggcgttatagttttctttatcttcgacagtgaacgttgcattaccgttaagattagctcccggatttttagtagtgaatatagcctccgcgacatcagcgtccacgccaccataaacacaggcatatactgagtgacgcaataccgggaaatttgtagccccagaattaactgttgcgtcagtccggtttgaccacacatacgcatccaaaacaccgtcagttgatagcagcgccgccagcattgcggcgtcagtgtttctgccgtttcgtgataccgattgcttccttcgcgtctcgaaagccactctcgattcaacatcaacaccgacgacaccggcggcatcatttcttactgcgtcccaaccggaaagaccggtggaataaatctggtttagttcccccaccccgcaggggatcggcccagtggtctgattctggaattggatgtcaacatgaccgctggaacctatggatgccccattaattgactgatagatatatccagactcatccatcgccgtgctacccgcagggatatgccgccccacgccaccggtgcatgtcgcagtaacaattgttccctgcgcagcgatccgctccatgaagtaaatgctgccaatgccatcctgaaatctgccagtcgcgtaatctgggttaatctgattgaacaggcacagtaatgcatcataatttgtggcgataatttctgtatctgactgagatatttggccctgtggtgaagatagcggttggctagttccgccccccatagcggcatcaaggtccgttaatctgcctgacaggacatcagcaatatcaggaaccagcaagcctgtctctgtgatagttacaccgggaaccgctgtttttaacgttgtcatagaattacctgtgattggtttccatctctatcagtcaccagtatggccccgcgcgttttacgtgtgtttttgtcgaaaaacacgttagcgatcgcttggctcacaatgggtaatttcttggcttcactttccatctttttggcgatatagccagcggaggggcgcgaacccaagacctcttctttccacggaatacccaaagtattgtcgtaataacactcaccagagaacaccaggcaggctgatgcgacatcttgagcgacggcataaccactatcagcaatggcaatgttcccattaccatctaacgttaagtcccatgtatcaggatcaagcattaaggttctgtatgtcatacctgattgtccgtagtgttggatgtgatagtggatgagccgccctgaacgttaacaacatcatgatcgtgggcgttgtatttatcacgtaactctttgagggaagcagattgagttcctgcattgtcagttatgttaccgcctgccgttatgtttccagtgacatgcatcagtggcgttgtcatttcaaccccatcaggagcagttatattcgcctttgagcaggttatgtttaccggattaggggatgtgatatttaactcactatcagcgaactcaataaactgcgttggatggccgttaaggaacccgcctaggtaaagcgcatcggatttgctgtgggttcgattacttcccggaacagactgggataaattggctcgggcaactgaattgtctctatcgcatacagcgatcatcccaatatcccctataacggggttcatgataatagctgagctgccacgctgtaggcgaaatactgggatattgtagattgtgctattgggtatcattgatcctgaacggtcagttcttgagactaacgggagaacatcaacaactaaattcggggctgtccctctcacccccttaaccttaacaatctcaataaaaaacagtccggtcattaatctttcaaaagcgtaactaaaagactctgcattacttgcttgcgcattcgttggggtaaataaattttcatgcatttttattttgtgcctccgcccttgcttcattggttctatatgcagtgcagactgaatgccacgcccctcccgaaacccaagacgatagttcatgccttacggttgaaagttggtatttaccgctggcatttgggagctctgtctccatttcgataaagcggccaataaccaatagagacgagtattgagtttgaaacataatcccgcctgatgaaaatatcggataaccaataagaccatattcctttgatattaatggaattatttcatctcgagtatttttttcaggccaaaactcaaccttttgaggtggagtcgccgacatggcaacgccataatcgacgcatatctgatgtaactgatcgaatacgctaccttcgaaataagggcttcccgatgtcgtcatgccattcattttattgaaagaggcgcgatatcccgccgcgctgcaaattgaattaataacgtcagttaatttttgagcgccatttacagagaatgggcttgctggcatgttttgcagatcagcatttgcggtagcagatatcatcaaattactatctggtgctgcattcatatttgcaactgatgaggtcattcctccagaaaacacgaccgaatcatcagcgaatatctccacgtttattctctgcgtgtctaacatattcccgtcagcgcgcccagataacgctgcaagcatatccagcccaagtccgtatattgatatatccgctgacgtccctgtccttcccactaccgcattcaatgaaacgacagcttttacattatttatggatatcttgttgtttccggatgaatcgaatgagctagtaagattggtaaagtcgaagcggagagagtgttgtttatacaatatcagcttcctccaagtagaatagttggaaccggctccccaacccctcccattgcggatcattctgtcctaccgaatccaagaacagcaggtcacctttaaacccaagatatgaataccgcaccatacggttaccgaaataacagggtacgccctgcatgatagggttgccgtccaccgtcaaatccatataaatggcactggtgcgttgtatcaggcgaatattgcattgctgtccgccaagttgcacactgaattcctgagatttcataggttcgatagatactgtcatcatggtttcgtcgcctctgcaatttccttggttaactcagccgctttctgtgttgcgctactaacaacttcaagcactggtttattcacagtatccagagcactttgaaatcctgtggtaatcgtttggtctacatttgaaacaatttccgatacggaagattttaggccgctccacgccttacttagctcatttaccgttgattgtttggctccggcaggattcaaggtggaagccccaacgccagaattacttagacttttttgatcatttgttagttttgtatttgattgcgaaccagacagagaaacctccatctgctgcatcacttcttgaaaatccagataaaccacaagcagcgtcacaccttgctgatgagtaacctcataggaatgaccgacaagatcataactctctaacgtctcttttggcgtctcaatgtcatatatccccgtcgttgctaacatgtccttgatggttttcaaggtgtcagactgactagtaaaagtaaggtcgaaaatgttggggatcgtaccggtgaaaccagtcattccggagataatgattgagcacctaaccctagaagggtctttaaccttattgatggactggtatttaccactttcaacgggagcattagttatttgggctctccctatcggctgaatagatgccattccgctaaactcaagagcaatagaagccttcccgtggtttcttattgaataggacgggtgaagcacgctgtctataattgataatggcgatccgccaccaatagcgttaaatatgtcgctggtgttgatgtctataatgctcatgggttaccaccaataaaaaacccagcgcaatggctgggtcgtggatattagaaagcaaaaacccgccggggcgggttagtttttatctacaaaatcttgagctactctagaaagataactcattatttgagtgtctctacctttctcatgagcattcggatgcattattgcaatgagcgaatatctattttcatacaactcaccctgaacatacactaaacatgcatcattggccgggtcacccttacgacatgctctatcagcttgtggtttattggatgggaactttttaggtggaaaacataaatgaatatgcattaatccagccttatatgctccgtgaggctgagtataagccacgtctcggccaaaatattcgggcactttagacgtggttttataaaccgcgaaatctcttaataaagccgactcaagtccagggaatcttccgaaaacatcatcaaagtattcattcttcgtttgagggtttatagatacttcaatgggctgcatccatttaccaccttagtgaaaacttttagaaccgagtttttcggtggtgtaatcagctaaatatctaagaccttgtaaatcaatatcactttcaaatgtaacagcatcttgtgttagttgcttaacgtagctatttaccttggttacaatagagcgggcttttgcaacttttctccaataagcattcatctcagaggagacaaatgatggcaaactactatcatcagctacttttttaagcgttatttcaaatgctctcatgaacatttcacaagcttcgaactcactaagatcttggcactttaaagcactgcgcgctttatctgttgaatcattagataactcaagcaactttaaataaaaagcattagcctgttcagttaaagactcaacaactgctttaccagcagccaattcactagcaaatttagccattaaatctagcggaacttcaatttctcctgttcgaccaacggtcggaactggagaaattgcgaacatctgcgcagacgcagcaggctgaggcatcgctgcgctcaacattgcaaatttagcgaccgagaagaaattcatatactacctctatcaaattaaactactcatgacctgtaatggtcgtttagaagtgtaattgaccgaggcgtcaacacacaaccgcagttgtttatcaaatagataaaccattggttaatcgagtgatttattttctacgcagttcacgaatttagctcgaacttacgcgatcttgcttgaaacaactggatggctgcacagttattgagccagatgatctttctgctaactactacaatctaccgcacggacgcgccagaatgcaaaaagcccacctgagtgggctatgttgcgtgttattgcgtcagctaatgggtagaattaggaaaacagcacaagggaattattatgaaaacccgattaataaccttatctttactggtgttcattttctcaggaaatgcttcagaaaataaggaagacataaaatcattagttgatgaaatgagacagtacataaccaaaggggcttcaagtccttttgatgcctgcaaaagcatagcgtcaagcatggttagcaagtatggaccacgattaagcgaattagggaaaactccatctgaagtaagagattcctcgctagcaatttgtcttgatgcgctttctcaagtagaaaccgcacaatcacaaggcgaaatatccatgtggaaaaccgcagccttgaaaaacattgatatgcagttcaaaaatgatagcagagggccagtaccaaaagagtacttgattgatagtattgacaagtcatctaagcttgctactcttttgttcctatcaatgcatgctgacgatcgccaataagcacttactttacagcgcttgaaaatgcctgatttgttgaggatcgactattcatctccttgaatccttctgccagttttgaagcctgttctgtagtcgcagttacttttacctcgccaatattttgactattgtagttgttgacaacgttttggcttggtgtgtttgctcttcccaccccattagcaagttgttgctgagtctgatagtaaccagcgtactgacttttggctgcgtttccataatctagcccattcttccaatttgaatacccttcgtgtttcgccatgtaggcactcaaactagccataacagaaggatcagaaagatctagcttatcgttagcaccgacccccatagctttcgatacctgagctatgtaggctgcagtgttgtttttgtgatcacccggtttttttggtggaggcgcccatttagtaataatcccactaatagtatctaatttatccctagtgtaataagtggatagctgatttctagccgccttccagcctgaatcttcatcagtatatttagcgaatccaccagaatccattccagcattgccttttgtcatgatatttagagggttaaggtttcgatctggcctatttttacctgatttattggttggagtgtctttatttgggtcatcgtaatcaataccgagaaatctctctagaaaatgctgctgaaagacaaatggcctctgctcatcagggacatctttatattgatcttgaaccatctgtccaagcaaggccaccgcagcaaccccaccaacacttttaccactaagtagggccatcgcagcaagaataccaagcgcattacctgcaccacctactgcttttataaacccatcaataccattaccaagccctttgaaaaacccaataatatcgcccttgttatctttcaaccactcaaggaactcctgttcagctttaagaacctctggcccaaatgttgccatcagatcttgctttacttgtgcaaattgcgagtccagagctttagtagtggcgaggatgttgcgctgggcttcttcctgttctttggtcattttccagcgtttttcctcctcagacaccatctgcacggctttgccgttcttgatgtctcccgcaaggttggggtcgtaaccaaatgcagccagagtctgcattaactgcttctcgctatgaccttttccatatttctgaaactctgccagagcgtcttcagatttaccgcccaacttatggatatcaacgccagttcttgcgccagtggtaagcaggttctgtgcttctggagtcagtccaccaaagatggttgggtcttccagattggcgagtgccatttttgcgctcatctgagaaccgagaaaagcgccaccattctgacctatgcgagaaaagccatattgagtgccaagaacattactggcactcgttcctagcattctccccatgttactggcccggacgatggattcagcggtactttcaaaagcgcgatggatgccgatggcaaccgcagtcattaccccaccaacagctagaaatcgcgttgaaagcccaagcagtccactaaaagccatgcttagccctttcacggctgctgatgctttatccgtttctttcgtcgttttggacattgaggaggtggttgatttctcaattgcggccgttaacccctcgatggcttccttaaggtctttagcccccctttcgaccttttttttacccgagagaaactcctcggttcttactgtgactttgtatgctagctcttcgagaatcaccgtagtttctccgcgtattgctgccaagctcttttgttatgacactccaccgcgataagctccagcagattaaacgcatcgcgcacagacaacttctcctgcaaatcaaggtaggtggccctgcctgagcagataatagaactcatctgtgcggatatgttgaccgaggataccaatttagatggcccctgatctggctgaatgaatggatactttacgcggctgcgatggttaaaaaatcgaagttcactccgaacaccttgtccatcagagttcgaatagttgagacctcttcaaaatcaatggacttaacctcgcgagtttgtttatttccatcgtgcgtaataacaatttgcacggtggacatcagacgatctcggagattacgtgaaacttcaggtgacgcggcacacaggacattaattccaaccgtagccagtccagcgcatcccatagcaataacatcagcaggaatgccagaaaagttagattctcccatcgaccggaaaatatcctgagctaactcgtcggcatcccacgctgacatttcagtgataaggaattccttccccttatcccgaccctcatcttcaacgatatatgtaatttgttttctggacattatgcggcgctcggtgtgcaggattcaaagtggaaaatggctgggcgtggttgcaatacccgcttacctggaggcgtaggtgtccacgtatagagcactccattcacaaagttgtacttgatgttaagcgctggaatggtcagcactgcgttgcaggcaaactttgctacagcggtgcgctcggctgcataccaatctcctatcagttgggcagcgttagacgttgccattagggtaatggtcagctccgttgggttgaagataaagccagcgtggtatttaccatctgctgacatcatatcctcagcgttctgcaatgcgccggtatcaaacatgtcttcggccgcgtaatcatcaacatcgaacccaccagggtaaaacgatggcacgatgatacgcaacttcgagttggcacttgtaatatcgataggcattttcagtccttacaggatatttgttgaggtcatgtcgatgctttgaatcaactgcccgtcgacgtaatagaagattgcaccgtcaaggctgcgctcggttcgtgatgcacctgtttgctgaggtatgaagaagaaccagccctgcgtatacagcacattggaaatatcggttccgaccgcgtcattgacgatgttgatttgcgcctgatccaacgtaacgccagcacgaatagcaccaaagttaatcgcattggtagccacatcaatcacagcagcagatatggaagcgtaaccgccggcattaaacgcatacgatgagttgttggtgaacaggttagcaaatgccgctactaggtttgcattaatccatacctggctaatgaagctatccagccagaggaacttgccggtaattgcgccatttgagacgtaattagccatggtcttgttctgcccatatgcgccgtaaaaattgtaaccgttcgactcaagcgccgctgccgtggcgttgtcagttacgtttggcgcgatacctgcgaatgcccgaaacttgtaagagactcggccattggttcggttaaaattaagcgatgcagaataagccagcgccagcaccgagtagagatacgaaccatacacagggaatacgttctcatatccattcgcaatgactacgctttgaacgaagcacgattcattattggcaaccgttgcatcttctgatgtgtcatacatcgagtaggcgtagcggttatttgacgcacttacccacgcgcacaactcttctttttgttcatcagtgagatcaaccacgctggcggtcatcacccagtcctgattctgatttacaatcgcccccattgtgtcggtgatgcttgttgctgccgcaccgggtgaagttgttgcggctgtatctgcggtcaatttcagtgcggttgcggcagcaccaggaacggcctgtgagacttcgctgttagcgccagtggtagctgaccggataatgaaccggctttgcactggcaaccagtcaacttcgacgccactaccaaacgcagtggcaattgctgctgctgcgtcagtgaagcttgttacggctgatagattaagagaagtactggttttcgatgctccatcgagcattaaagtaatcgtcccagtaactccctgtagtgcagcgattttaacgcctttaaagctaccagagagcagccagccagctacaggttcttgcaccaaccgcccaaacaaaacagcacccggtcgaacagtggcgttgtcatacccggacatatatagcgatgcagccaggtattctttgctggttgtgccaaaggctgcgccaacatctgccgcgctggtaaactcggaaactttaccaaccggcagtaactcgttatcggaaagtagtagtccgtaaacatccagcgcggttccggctgcgtttacagtggaaggcgtgatcttaaagtcacgcgataatggaattttgctcattgagtcgccttatcagcttgttcgatagaaaagttaaccgcgtcgaaatagtcctgcttgacgtcgattgtgatgtgaacctgaagtgaaacggtcagcatgtagcgctcttgccactgattttcagcattgatcatcggtgcctgaattgcttcggtgctgtatagtggggcgacccgactgtctatggccttgattgcgtcataggcatagccagtgcggaatagcgtctccaaagcgatagcccgatccccggcattgctaccgtagatatcaacctgaatttcggcctgcctaacctcagtaaagccaatggcacttgttgttggcgaaccagtatctttcttgatttctcggctggttgaatgacgcttaaatcgcaatggcgtcagaatgcaaaactgccccttatccatcggaaccctgttagcctgtgcttgttcacacttaccgatgaattgctctgcgaagtcggccagcacatcaatcacgttatcaatggtcatgtcattcatggcgtcacctgcaactgaacaagtaacctgcaccaatcaggccacagctccaatggctcaataaccagccattcttcactaccaataataaacagatcgccaccgagcactttttcacggttcaccccgtaaaaatttccatcaacatgaatcgatttgagcagtccggatatatttagcccgtccacatgcttcaagtcgccgggcgataggggctgcaactgaatggtgactggtgcttcaggtaggtacttgggaacctgcttccggccctcacccatagtgaaaccatcagaccgacgaacaagtgcagaaatgaatgggtttacgcggttaatggcaggtttaactatccgatgaaggttcaatttctcccacctcgtaattgacatctccgatcatttctttagtgtcaaccaaaggcttatcagattggttagggagcacctttctcgttttacgaatgtgaagagttacatcagaaagttttggctccatgagggtagctatcgattcctgtatgtctccttttatttgagcgcccacgacctcaagaacttgcgtggtatcaattcccgcgcgaatccccctggataccgtttcggcccaatcaccagacttttcacttatcgcgttacggaaaaatggacgaggtggctgattattgccggggtttccgtactcgttgattgccgcaaccattgccacgctcgttccgtctggataggttgccccatcaataaatccagccttcacctgtttggatgaaagctgcttttcaatgttgttcaggaaatcagatatcttcccggccataatcaactccccggatagtagttagccatgcggtataccttcgttgcctgccagtaatccattccatacgggctttgcgtgtaccacatgtaacggaattcaaccacgccagcctccgaagagaccgagacagaaccctccgaagccgacgacaaccgccctaccatgccggagccaccgttacccttgtcatccccgaatctcatgtatgccaaatgagccataagcaggtagagcaagcgctctcgcttaacggcatcatctacaagtgagaattcagagttgttaaggtaatcggtggcctgttcaaacaggtaagggagttgttcgtcggttacattggagaactcagggaacatggcgcggaatttcgtgatatctagcaccacgattgccatggattactcctctttatcttccgtcacacccgcggtttctttggaggcctgttcaaagccagttttaactttggcgttctcccgacttgcgtctttagctgacttctcatccgacaccgcgaaaataatgccgttacggatgaatttagaatcctggtgaaccttagcgaactcatcccatgcttccgcaggaacatcattggtaataccaaaaccattgaccagcgctgatgagttagcgccagccagggtaatgaccttatccccatgacggaacgaaatgccgctaggcagtttgcaaccaattacgtacatgtttgatttagaagccatcagttacacccccaacatttgagcgaatagcgtaggctgggtaattaccgcgccatacgttgtgcccgagtgtttctgcttccagcttgatgtcatagtaatcactgggtgggcgcggagtttctcgctataagcacaatatccagcatcctgaccttgggcagtttcaacgaacatttgtaccagatcgcctgcatctgtatcgtactgcggagcaatctcaatgcgcagattagtgaaggtgtctttaaccatcttctctactgtgttaccaaagatctcgttagcacgcttgaaccacacggaagcgttaggactcatagccagaaccagtggtgacgccatgtcaacgccatcacccactacacccttggtgcgagcgatcaggtcagcataaagcgccaagatatcgttatagatatcgatgacttgtttatctttccacagaaccttgccatcgacggttgctggggtgattggtgctggcaagtctgggtcattcaagatgccgtagttcagtaggccagaaacaccataaaagtagaacttattttgcgcttgattcagtgtccaagccgcagcacgctgtttctcagctacgtacggcagcatagccagaccataacgctcctgctccaactcaccatagatcaccatcgtttgatagcgatacacctgacggttttcccattgggaagtaacctggttgccgccctgctcactgtaatcatcataggccacgacatcacccgattgctcgatgcgctgaatcatcaatgtatcttgcgcccaagaacctttcttcttctcacctagaatgtctgcggccttttgcttagcaaagatagtgcggacgatctccggatcgatgaacgtagaaacaatggcaggaatgccgccgttagctggcagcgatggctgaacatcagcatccatggcaaacttggtcactgaggatggcaagtaaatgccgcgcgattcagcttccgctttaaaggcagcgaaatcagcctgagtcagttgaggcattatgctttgctccatgtagagataataagtaagtcaccgacggcggcagggcttgccacataccagtcagtttcaaccgcaccggaaaccgtcgctccagcgtcatctgttttcagtgtaccgtcagcaagaacagcaaaaactttctgtcccacggtggcaaccgtcgcagcgatcgcccagaaatcccctcccacaataggtgatgcttcacgacctgccgagatggtcatgctattactttgcaggtagccgatggtggcattggcgttgttatagatgaagccaacaggtttgccggtgccggagttatccagtcgcagagggttagtagagttacgccatgcgaaacgagccatgactaatccatcagttcccgcctgaaatgctcccggaccgcccgccgccgcgatgattggagtagttgacgcaggctgtccggcctgtccaacgccggaataaatatttacgctcttttgaaatgacatattatttcccctcgaagaagtttttcacgttagcgcgagagtcgtggctaattggcgctgcgtcgtttgccattgctgggcgagagtaggctttgaagacagattggagtgctgctgaaggcaatgttgcatgatctgcacatcccatctgcttcagcgcggtccggtaaacttcatcggcactatcgcatgctaagtcgccaaccacggggcgaacatcacgttctgcctgacgaagcgcggctgcgcgggcttcaacggctttaatcgctgaatccatagctaatttactgtcatttgccatcttctctttatcggctctatcagcctcatctttggctaacttgtctttctcagcctgctccgcttcgtctttggctaacttttctttttcttcgtcggtcatctcgtccttcgctgttttggggtctttctcgtcgtctttgatgagcttttccacgtcctcttccgctttctttacagcttcagggtcggcatcgttagccatcagcggcttgaagatgctcatgagttgtttgatttttgacatcagtttgagtcctgtaggtagtgagtcatatacaaatacatccgggccagcccggccacttggcacgattgccacatggttacaaacgatgtcacgcataacgccatcgtatggttcgccctcgtactcgcccggcgtcatgtcgagccgataacggtatgaagatgagatttctcgctgctgtttgttctctacgccgataatggaattgatgtcgtaaatgcccatcgaattcttcagatacggagcttcgtacactgcgtcagtgccagtcgaaccaataatgtgttcttttggcgggtcaattaccgacacagcgatgtgagtgtctagaactggtttgttgttgaatgttggagcggctttcctgagttcttcagggtcacgtagcaaccggtatgccttgtcagggttaaggcctaacgcttcccaatcgggtatctctttgccgtagtagacgcagacgttagccttgctgataggcgtcagttcaacatgaagcatcccgtcaacgtcatagcgacgaacgctcgccttatcgaaggcaaacttcacatctttcatgttctttcctgtttttcgggcaataaaaaaggccgcctaagcgaccttgttcgttttatattttcagaatggcaatactggcttccatacacacccgcaattaggctcttcacccggcaacacatgctgccctttgtcaccgattggcaggcccttatctaggtcgaactccttcccgttagcatgaacgtgcttcttgcggggttcgctaccgccgccactgtgtaaccagatgcctcgcttaatccctgccgcttgttgccttgcgttggatagtgcgctggtagccttgcgtacctggtcacgtgcaatgaattcagcacgcctgcgagtaataccatgacgcttgccaaagttagcttccatttcgtcagccaatcctttgcggtcgccacccttggctactgagcgaaacaccatcgattccacttcagtgaaatacttctcaggaatggagcggattaacgccacattctctgaaatgatagcctctcgcttttcgagcatagcctcagtccactgcatgttaattgtcattgagtctttacgggcagcagcaagtaatgagcggtcaacagcctcgccagtcttgtttgtcactgattcggcagtaggtagcgccatcttaatgaagcgctctacccacttcctagacagagcacgcaaagcactacgcaacaattgaaccgggttagcgtccatcgccagtgggttatcttcaaatatcgggacgatttgtttcttaacatcgtcattcatttctctgataacagccagtaactctctgcgataccaaatgatattaccggcgttatagttgaccgcccgaaggcttctactcttcttcggtttccggttcatagtcacccttcaggttttcgaatcctgcaccttcaatgcttttcagtgcgtctcgcgcctcttcagagttaatcagcatgctatcagcagcagcaaccacggtttcaacgcgagtcttgttggtgttggcacggtcatcatcgctgacctcatcaagcggtttaaactcgaagtagatgtcgggcttcagttcgccaaactctgaaagctggataatcttgaagatgttctcaatggctctgcgatagtccagttcttgcgagccggatatcgtttcgtgccacgtctcaatctcagcatccccactggcattcaaacctgctggggcgttaccaaacatcttcaggttggtggtgcgtgatggtatgcagagttgctcttggtaattcgataggatgcttgacagctcactcagtgatgtctgcatatgaatcagatcctcttcagtatcgagagcccatataccaaagttatcctgatacttggtgaacattttaatgcgcttatcaaattcaccagggatttctaacctagcatccatatccgtcttcagcgcccgcattcgaagagttcgaagaatctttatcacgttcttcttcgcatctcgccagtcaacaacgtaatcctccattaactgcgtcagcgaaagaccgccgaagttatatgatggttttagaatgtcgggcactgggcggctaacgatatcgatgaatcgagactcatgcaccgtatcccccatcacgaaccatgcttggggtttgtagaaatctggcctaagcggtttgtttgagttgtacatcgccggataaacccaattagggtctacgcaacgaaagcctttaagtgagcctttagttatcttgcgcgggtctagaaataggggtttttcgttctcaaggtcatcggcgccaacatcaataaagatgtgtgccacgccatactctgagtcctgccttacggcttcgtgaatcaagcgcttaatgtcgtatttggtcagcgccttatccattaggtcgatatcaggatcaccctctttggtgctcttcacctcaatccagtttcgcgtcatctcgtcagccatgatggtatgcatgttcgcatactcaacctgctgagacattgccgccaaaatagggtagccacgaaagccagaatattcaccaccaataaacatgccgttgatgacatcgtaaggcgtggagtccatcgctagagcggattcttctttatcttctggaatcacacctggtagcggttcgtaacgcttaaactcagcaaatggcttctcgccattcgcagcagacgccgcatcaagatgcgcatttgtaatcttcgccagttcccgccgaggtgcttgcacggcttgagctgttcgcacagccttctttcttgtcattgcagtatctcgtcaggaatgttgaatggtttgtgcgccggagcaaatgccatgattagcgagtccgccatatttggtgacggtatgccacgcttcttcatgtctttcttgctctcaaccttcacgcgaccgttattgtcgtagtcaacccatgggcgtgacagctcagccttgaggtattccagttgtttaatgccggagctaaggctgattagctgatcgtctgaaaattgtttgatgaattctttgtcgttggggttggcttcgaggtgcttaaccactcgccatgtattgaagaagcgatcacggactccccaccatgcctgagccttgatattggagaacatgtctttattggtcttgccttcagcatatttagcatctggtttgaatacggcagcacctgcgttaaatccgctggacggtatcgcacagacgcgcctcaggtgagcttttacgcctgcacccacgccaatggagtcgtaaacaatctcgcttgctgtgacgctttctgcgtagtttttgacgcgatcagatgatgtgattacatcacccttgttccactgctggcagtccatgacaacagagccgtgggccagtgttgtagcgttgctatcctcgccttcatctgctacgtcaaaaccgactcgcttacgaccagaaggggcgaagccaatcagtttatgggcatctatagcggcagcaatccacgatggcttgataattgccaagtcactgtcggcaaccggctcaccttcccaaatgtgcaggtaaaggtcgtaatcacgttctttgcattcagccatttgcgcagggagcggtgagtcatggaagtgagggttgtcgttgtaattggctttcagaacaatcgccccagcaggaggcctgacgatgaagcgctgatacgtatcgtcaagaatgttcttcgggttaaagctcacccatatctctgagtgtttgtcgcctcgtatggatggaatcagtacatcccatgagtcttttgttaccgcctcggcctcttctacccagcagattccaacgccctgtatggattttatttttgtgacgttgtttttaatgccggagaatacgaagctagcaccggttgctaggtgaatgattgtgtttttctggatttcgaattctgtggaataaccgagacgatcgatagtctcacatagcaatttgtggactgagtcgctaatagaaccctgaaactcgcgagtacacaaaattaccgtgttaatgcgtcgtgcaacctccacggcaagttccgcaaagaaatatgacttcccacttccacggccgccgtaagctattttgtatggagcgctttcggcgaatggcttgaaatgtggattagccatcgaagatgtccttaatagatttgtgctcgaccttaactccgccactcagctcgacaatcactttgtccaggccggtcaacttggccttgcccattgttgcggctacggctgctgatgattgtggcgtctcagccgctaaagctgatttccgagcctcttccaattctctaatcaaagagtcaacagtgacgtgatggcgctgcttaatctcaccctgcaattcggcaatccttgccgtgatcttgccgttgtctaatgactctttagctttccggttaatggtctcaggtttcatcttgtcagcagcatacgccgtccgatatgcctcagaagcattacccgtttcgatgtatgcctgacagaatgtctcttgcttctgtgtcaggcttgccatggttatttctcgtctgaatactgcgtgataaaggtttctctaataagttcggctctaaacttagcccccctgatggatccgggtagaatttgagtaatgtctacccctgatgcccccaaatctcttaacgcatcaagttcttcatcaagcttcccaagcagccaatcgctggccttatcttgaattatttctggaacgacgcgagcaaactcagttttatcggtcaccatcatttccttacttcaaatttgaatccgtggcctgcaataaagcgagatagcagccttgctacggcttgacggagttgacccgtctcgttgttcaacgatcgttttaaacgatcaatagccgattattgatctgtacaaccaatttccatccctctgatttgactgtcattcttttgcaaaacaaaaaggatgatgactatgtgggctaaatttaaaagttggtacatggctgcaacagtgagctactccaccctggcattggggctaacctttacagggatggcctctttggtcgggatcgcctatctgatatatgagtgcttttagttaatggagagccgttgtgaaagtggctctcagtttttcttttagctggcaatatcgagcgttaacttcagttgctcctgccagaattccacggttgcttctagggcaggtttgtcccagcgccaacgtgccatttctcgtgcaccaccacttgcttttgatttccggtcatcgcgaattcggcaggcctggtcatagttttgctgctccgttagctcaccacgcaacaagctatctatatgcaaatcacaccagacagcgaaccgagcatcgcaccaacgcgcaaaagcgaccgatagctttggatgaagccatgtaccacctccgcgatcctttctcgccttactggtttttacatacctgcatttcgagggatgtagaatttcagactccacaccagtcattgcctcatccagcgcccggatgtattcaagcgtttcagctagcctcatccagttgtcgatgcgcttaccaaatttctcagcaacgtcagtgacgtttacccaaccttcagtgttaaagcgtactgattcgcctttatagctaagagggataatgttcattcggatataccttttagtgatgaaccttgttcgcacaggaatacggccctcagaaggctccgacagccagccggttcctcaagggtcatcctgaaaggttctgagtgatttgcgctgcgatgcgctggatttactgcataaaaaaagcccgacctaagtcgagccttttgtgtttttttgcctaacaagcctacgaaacggccatttcaatcaaatctgtgaagtccaagcacatgtctagcctgtgtccgtgatcatccacgaagttatatttcttaaagtgttcgatcatctctttggcacttttgccacttaaaggagatttatcaattgattcgtcaacctgtttcatcttcaaaccttcattcagttggttacgatagtgcaagttccactttggaaattgcttttctaggaggcggtatttatcaatattcgagagtcccggcctccattcacacgtcattaatgaacgcaccgtctaaggggcagtattttgatgcgcatatcaaaaaagctggctacccttaccgcaaagttgggtgattaattcagcggggatgctgtccccaccttctcttacctcgcaagacaaacgttattgatatacgcctgcaagccgtttatttggctggttgcaattccgattcgctcgcggagactgagataatcccgttcagcggcgttagtaagtctggcgctggcatcatcaacgctgctggaggtggctgtggcttcgggcaatcgcttacagctggcgttgagctgcaaccgcttagcaccagtagcgatatcagcacgaaggcgctcgttctcagatttggcatctgccagttccttggtgtatttgatatcgatagcagcaacctgctggcgctgaattagcatcgtgtcaatggctgactgtctgctgttggctatctgggtaatgtcagagacgtcgcgctgtagcctggttacttgcccgtggtaatacatcaggccgaatagcagagccaccgttacagcgatgagtattgccgttacgcgactcatgacaggaaaagctcacgctcagccgcccggcgattagtcaggcctttcatttctttcccacctgctttattccatttcaggaattcatccgcagcgccctttgcatcacccgcgtttacctttttcatcagcgtcgatgtgctgagcgctcgggttccgatgttgtaggccagcgataccaaggcgtcgaattgattctgggttacgccgattttgagcatctggttaacgccctgctcgaactggacaactccgcatttcagcaaccggtcggcggtaggctgatcgatagtcatgccgcgaaccacgggcttaccatctactggatgagtccagccgtaaccaattgtccagggagcgccgccggtgccagggtctggatatgccgtcaatttgcagccttcgaattgttttattagattgattccggtgctactgatttgcattgtcagcccctgtcttattgccaacgatgcgctttagcaccgaaccaatgtaatccgtacccatgtacccaatgaacacgctggcaattaatgaccagtcagggttcagcccggctataaccaatacatctttgataaaccatgccatcactgagcacatggccgcatcaagcatacgttgcgttttacctcctccggcataccagccacgcaagtaagccatcaacgcagccagtgccgcgctaagtaactcaccccggtggtctgctatccaggcaatgatgagcatccatacatccggtgatttcaacattttcatgacccaccccccgtttggggaaaatcttccccggcatttggtcgggtgctgttgtgtagggaatagctcccgtcgtagtcattcgaaagtgtgagcgtgttttcagtgattgactgttttgacgggagctaaataaaaaaggcacaccgaagtgagccttaaaattggtatgtggtggcggggaattcgccgacatcgtttcactggtgttccacttgtatccccacacatcggtgcctgcattcaccacattcggctggatactgtttcacaacgattggattaaccaatccagtacccatgcgaatgtagaatgcaaaaagccccggcgattaaccgaggcttctaatttttgtggtggtgagtcagctcaagacggcattcacaagcgccgtttacttactacccctctaccaccaccgctcttcgcctttgacgtccgagcttaactgaaatatacactttcaaaacttaaaagcaatacattacgtaaatattttctatttatgcggcgattagtaggttttctttctccacttccgacctcaacaagtgaaataatgttgcgttgaatatctcacggcaccacctgatccgatcaatgcattgctttagcgtcaggtgcggggcgtgaacgcgatttaggtaacatgcgatttcttgcatgtctttgcgctcacaatagtattgaatagctacagcacgaatcggattgctttgagtaaatgctttgaggactacctgatcgacaaatgcagcttcttctccctcgttggcgcgcgcgaaaagattgctgaatgagtttctcgggttaattatctctttggccttctggaataattcggttccccggtagcccaatttgtggaggtcctccacagtcttcacaattgaggctcctttattttcatcccacgcactgacaatcattagtcggccaataacaccacaactccctgtcggcgcggtgtcaccaccgacagcctgcccccacatatttaggactgaccttacccaccgatcctgcactggagtgatgcgctgtaatttacccargtaacttctgcgtggagcttttgcaagctcgtgccatacattggatttcatgctgcctcctggagaagttttagctttttcagttccagccggtagtaatctcgaatgcttttcagctcttcaatgctgtaactgctgcgttcgtggttgttttcgatagcctccactgtctcaattccaatgcgcttaatcagctcgacgcggtacggaacgatattcccgctcttgtgctgattgcatactgaacattgtttatggatttgccgggggtcgaatctgaattgaggtgctgctgcggttgttctgtagtgccctgcgtcccactgtgctgctgaagtggtgccacatgatacgcagggtaggtttgaatctcgtgctcttacaaaggcgttgacggcttgctgcgcctgcttaatccaatacgttttggggtgggcattaattcttctgacttttagctgcttccgatcctccttttgccgctcctgcctttgcttaatctcgttatcgtagttctgctttcgcctctctttcataaccagaaccgcgtattctattttgtgctcttcgcagcaccaccactcgtatatcgcggccggtttaaatctcgttttacacactttacaatttcgactcttcgggagcttggctatcattcccggcctccttcgctgctttatcaacgcatttctgatgggcgtaggtttcacccttgttaagcatcaagaagcaatacacgcatacggattgcggtaactgagtcatgcctgctccccttgaatctggataactgttaactcacgcccaaataccgcaccagtgtcgatatagaattggtttttaaattggctgggtttactcattggcgtatggccgaagataaactgctttgccccagttatttctgcacctaaaccatccatagcgtcacccacgcgatcccgattccaaataacaagctcctcactaaccggctttccgtaataatattcattgccagggtagtcggcgtgggccactacatatttaccgctgtcagttgtcacttcgatcaccagcggcagcgcagcggcctgattaattaagctggttgccaatagtttttggtcggggtcgagacagaaaaaccacattccgccgttagctacccagcattcagccattccatattttccatccagtgcatcaatcgccatttgctcatgattgccacgaaccgcacgaaaccaaggctgcgttatcaggtcgaggcattcgacgttctgtgaacctcggtcaatcaggtcgcctacggatatcagcaagtctttgctctcatcgaaatctactgagagtaatttctcatcgagcttattcaggcagccgtggatatcaccaacgacaaatattcgtcggtaatcggccccgttaatcttttggtaaatatcaggcattctttctactcctgagtcttagccagcgtttagctaataacggatagatagcgtcatatgtgggtatttcgctggcggggattgggggtttaggtttggttcgggatgtcttgcggaagataagattgtctagggcgaaaactatgctgctttgcctttgtcgcatggtgtatttccccaccggttagcccactcgatttccagcttggatgcatcgctgaatatcacgccctgctcagtgccgaaccagtagatagcctcgataacctccaccatctcactcactcgcatcttgctagtacgctggccgaacatcaccaccccgccgccgattccaggagccgtacgctgatcctgatttttggccttagccaccatcgcagtaatcaggtctttccagtcagcttcatcgtacttctcaccgaaccagagaacctgttttgataggtcgtgcaaaagtggccacattttccgattctggtcattgctgcgtttcttctcctgaatgagaacctcaatcggctttttctcatcaagcggcacactgcggatcgctgctatggcgttgtcacgtacctgggtatttcggagtagataggtatgctttgtcatagtggcttctccggtgcggcggctagcatattggcatagcgctcttgcatactttcaaagctgcctgttaatcccaatagcgtgagcatggctaaagttgcctctttcggtaatagtttccaaccttccggaattaccggagagttcaactgtggggcgagatagacagggatatcacctgcaccgccctcaggccaaatatcagcatcagaaccggatcgaagataatccaaatggttttgctctaaataaccaacaggctcagccctctttgcagctaacgcgatgcgggctagtgctgcgatttccctgaaattaatcagattagtgactctgtttggtcgataatcgcaaaggctttctagcctctcagatgtaaatctatctaattctttcatggctttacctcaacgttaataaacccgccacagccacactttgggcagcattttcttttggtgccagaagactcatcactcatgacaaccctctctagcttcaagtggtgatatctgcatgctacgcacattacggcttccgttgttttcattcactctctcccttgattcgaatgccagcagttcggagggcgttggcggtggcactcaacccttcgttgtaggcggtatcagtgtcgaagttttcatctcgctggtctggaaactccacctcaatgctttctcgcgacgcttgccacgctgtccgcatatctaacactgacgctttagctaagttggttaactcgccatcgtcgccacactcaaatgcaaggcggtaagtttcgtgggatttcgatttaagccaagcttcaaactcttcccgcgatttagttatgtccatcatgcagccctcttcgattcgtatctggcgcaggtgatagcagtccaggcaatcagttgtgcgcgtttcatgtgaagctccttcagccggtcaagccagataaataccgggccggtgtagccgttgtgagcaaggcgaatatattgctcaatggttaattcatcttcgcgagtcagttccattagaaaccaccttgttttttagttgaccggcgctcagattcagccgcctttgctttagcctgatcctggttgcagtcatagattgcgccatgacgttgctcgacgaataccaccccgccgctgccgtgccggttaagccggagtagtaattcggtgtcctgctgattggcgttttcgtcgtaagcaccttcgcggtatattcccagccagtaatcacagtcttgctcaatctgtcctgtgtcgcgggagtcgcttggttgaggccgcttattgacgcgcctttctaaatcacggtttagctgagtcagcagaacgacaacgcaatcaagttctttggcgaggttctttagccccttggtgatcatcccgtaagccagatcattacggtctgctttttcggctgacatcagtgtgaggtagtcaactaataccatgcctacaacaccacgttcgcgcttgatgcggcggcactcagaaacgatgtgagacagtgaaagtcccggcgtatcgtcgatgtacagattgccacttctcgccagctctaaccctttcgcagacgccaacgcaaaacggttatcgtcgtacccatcaagataaaaattactgctggatactcctgaggcttgggaaatcatgccttcgcnnnnnnnnnnnnnnnnnnnnnnnnnnnnnnnnnnnnnnnnnnnnnnnnnnnnnnnnnnnnnnnnnnnnnnnnnnnnnnnnnnnnnnnnnnnnnnnnnnnnnnnnnnnnnnnnnnnnnnnnnnnnnnnnnnnnnnnnnnnnnnnnnnnnnnnnnnnnnnnnnnnnnnnnnnnnnnnnnnnnnnnnnnnnnnnnnnnnnnnnnnccggtaacaaagctgattgcatggctgttgcaatgcaagccgttcaatggggtatgaacccgtttgttgttgcccagaaaacccacgtcgtcagcggaacgctggggtatgaggcgcaactggtcaacgcggtaatttacgcaatggcacctacaaaagaccggattcattatgaatggtttggcccatgggaaaacgtgatcggcaagttcgcagaaaaagtttcaaagaacggcaataaatacatagcaccagactggactctggcagacgagaaaggcttagggattcgagtgtgggcgacgatgaagggggaggatgaaccgcgcgttcttgagcttcttctgtctcaggctcaggtgagaaactccaccctgtgggcaagcgaccctaagcaacaattggcctatctagccgttaagcgctggtctcgcctctactgccccgaggttattctcggcgtttactccactgatgaattggacggaaaaccaaagcctgagcgagatgtaaccccgcgcaccaatgccgacctgaacaagatgatcaacaccaagaaagcggagccaatcgagggcgaactggwgaykrcwrwmstnwgatgnakcgctcacctgatgccctgcttgctgacttcaccaacgcagccagcaacgcaaagtcagttgcagatctggagaaattcttcaaatacagccagcgtgtcctcgctagccaccccgaccagctggaaaaggcgatcgacatttacagcatcagaaaagctgagatggaagaatccgtggggtaacagatatatggataatccgcatggaaacatcacggtaggcgcggtgacgctaccttatccccgaatacatcatggatggattaccccgaagaaccgcattgaacggaacccatttaaagcgcaattgattgcggagcggttcaactcatgcttgaagctatcagtcgctgctaacggactggtggcttaaatcccttacccctccacttaaccggcagtcagtctgctgaggaatagttgtgtcaaaaattcgagaagccattaacaaggcactccaataccgagccactccatccgagcggcttttaatattgtcggtgatactcgctatctgttgtgcgggtattgcttatctgattattgattcgttttgaggtgatgggaatggataagcatatagaagagctaagcaagccggtggcgtggacagatgcagaagaactgcaagacatggagcggggatattctggttacttgttcaaatcaatcctgatgaccgcaacatcgacccgcacaggcaaataatgctttactcgcaagagtacgttgattcactgctagccaagctggaagcggcagagaaagaaataagtgactggcgttctgttgcaggagcagcggcacaagatgatgctgactggcacaagctggcagatactgacaatgagataatttgtaagctagcgaatgctcttattggcgcagatgaacgggccaagagagcagagaagaaactggctgaccttgaatttgctgattacaggatttggcatggcgcggcgtgccataacggcatgaaggttatatcattagagaatgaaaacgctgaattgaagcaacgcgcagaggcagcagaggcgcggctacttgtgcctgatgggtggaatgtactaggcccgacttatccagccccttacacccccgttcttgttgctatgaatggtgttgttcaacacatcacctaccaaatcgaagaaggtgataatggcgactactggcaaccagtgaacaatgaagatgatgatggtgcgccaataaatcaattccagcactggaaaccgctacctacagcaccagtctatccggttgaagggggtgagtagtgaacaagcctacgactattatcgacgtggtactgcgcaagcacatggactacttcatggagtctgaccgcatgttaacggtgtatggggcggagaagaaagcgctgaacgtaatccgtaacatggacaacgttactttgttatctgccattagttccgccgcgcatgagttgtatagccatgtggggaaaggccctttaccgaactaatccattatagccagtgaatatgatgagctattcacagcatccaagccagcggaggaataatgctaatcggctttgtcctacttgtcagttcctgcggccttgacgcctgcgaagcgctgccagtttcagacgatatctaccctacccagacagaatgccagaacgtatccgcgctgattaaagaacgccgcccggcgacagtgctgatatgtggcgaagtacgccgctaacctcttccccattttcacggatatgaagaaacggatttcactaaatctggagtatcccctatgcgaataaccattacggcgccggactccggctgcattgaatttgccacgcgtgcattaaatgcctttatcaaaggccgtggcaatggcgaattcccgcatccaagcggtgcaataagtaattcattttttggcgccgaatgcacagaaaagcccagcgggaattattcaattaagtgctggcgtataccaaccaatattgcggaggcagcataatgcccgacgatatcgataacgcttcagctctcgaacaacacaacatcgacaccgcaatagccaaccgtccaaaaccaacaatgacattcaccgggcgctgccacttttctgagtgccgcagggcaattactcgtgggttgttctgtgatgctgactgccgggatgaccatgagattgacgaacggcggaaaaggaatgcggcatgagtgactaccagcttatctattgcgacccgccgtggcagtacagcaacaaggccagcaacggggcggcaaataatcactatggaacgatgacgttagcagagctgaaacgcttgcctgtctggtcgatgtcagcaccggatgctgtgctagccatgtggtacacgggaaatttcaaccaagaggctcaggaagtcgccgaatcctggggtttccaggcgcgcacgatgaaggggttcacctgggtaaagctaaaccaactggccgaagagcacattaacaaggctctggccgccggtgaggtgcaggatttttacgatttcctcaccctactgaatgaccagtcacggatgaatggcggtaactacacgagagccaacacggaagatgtgttaatcgccgtgcgcgggcgggggctggagcggctgaacgccagtattaagcaagtagtttactcgccgcttggtcatcacagcgaaaagccgtgggaagttcgcaaccggctggaaatgctttatggggatgtgaagcgcatcgagttgttttcaaggaaggagttgcagggatgggatacctggggcaatgagtgcggccagtctattcaactgatcccggggagagctgaggccatatgagcgaactaataatttacctggattgggtgctgctctttatcggcggcatcatcacctactggtggctgttctgctggaaggagtgaatgtgtgactccacaagaaaagcaaaacgccctccagtcagtagcaaagaaatgtaacgacgaaataaataatgccctcgccgcactgccggccaacaccaataaagacctggtgacccgtccaatcatcctacgtcactatgaaaagctaaagccacttggctacaagctggcttggctgctttttgctatcggtgtgctgaatggtcagtttaagtgggagaggtgatggagtttctcaggaggtccatatgcaagaggtcgagaaatttataaagattaaagaatatgccgcgatcttaaggatttcagccggaaccatttacaaaaacccactcaaatttcacatgtttaaggttggtgatcgctggagagccaatctggacagtcttaaaaagtttgaacaacaggccgcaaatgacaacaatgtcatccggctggctgttgtaggcggtaaggagaagaagaaatgccgatctacaaaagaggtaaaatgtactggatcgatgtctcagcgccagacggaacaagaattagacgctcttctggcaccgatgaaaagtcaaaagcgcagagattgcacgacaagataaagcatgagttatgggccgtggcaaacctagataagcggcctgaaaagttatttgaggatctgatggtcctagcattgcgggatgcggaggggcaatccagcttcactaataaacagatatatgctcggtactggcttagtgtttttggtgggcggctaatctcttctatatccggagaggaaataacagataacctaccaacgcataatttgatgacaaggaagcgcctggctaacgcaaccagaaaccggtaccgatcattcattatgcgagggttctcgcttgctgataaaagtgggtggttggaccgggagccatatgttcagtctctgcgtgagccaaaggtgagaattcgctggatagagaagagcgaggcaaagtgccttattgacaacctgcgtcatgactggatgaagcatgtatgttcgtttgcattacttaccggtgcaaggcttggtgagatactttctttgaagtggagagatgttgacttagggcgtagggttgcggttgtcacagcggacaatgccaagtctggaagggcgaggccacttccgcttaacgatgatgctgtagccatcatgaggaaaataccgattgataatgaatttgtattttctgctgatggagccaaagaggggtatatcaacaggaccgactttgaccgagccatgttgttatcagggattgaagatttcaggttccatgaccttcgccatacctgggcgagttggcatgttcaaagtggaactccgatcatggtgctgaaggaattgggcggatgggagaaacttgaaatggtaaataaatacgcccacctgagcggtgaacatttaagcaaattcagtggcattgtcacgtttctggcacacgacgctggaagtggtgaaaacgccaaccgaatatcgcttgtaagttaatgaaataaaagtaaatttacgccaaccattaatcactaatcggcgatagcatcagataaacagtctgatgttgctattgcctgaccacacaaagtatgtggcctgtaaattactggttaaccgtctcttgcggtgccagtgggttacggctgataaacatcgcatcgccgtaactaaagaatcgatattgctccgccacggcctgctgataggcattcatggtgtttttatatcctgcaaatgcagaaaccagcatgatgagcgtggactctggtaaatggaagttagtaaccaacgcatccacaacctgatactgatatcctggataaataaagatacgcgtatcaccgaagaaaggagcaattaagccattctcacaggctttggctgcactttccagagaacgaaccgaagtcgttcccaccgcgaccactcttttaccccgtgctttacatgccaataccgcgtccacaacctctggcggtacttcggcatattcggaatgcataatatgttcttcgatgctttctactcgcactggctggaaggtccccgcgccaacgtgcagagtgacgaaggccatttcgatgcctttttctcgtagcgcagccagcagaggctcgtcaaaatgcagccctgctgtcggcgcagccaccgcgcccggacgctcactgtatacggtttgatacagttcgcgatcggcatcttcatcagggcgatctatataaggaggcaatggcatatggccaatcgcattcaaaatactgaaaacgtcctgttcttcatcaaaacgcaactcgaacagcgtatcgtggcgcgccagcatggtggcgcggatactttcattgtcgcccagaagcagctcagcgcccggtttcggcgcttttgacgccctaacgtgcgccagtacccgatgatcgtccaacactcgctcgaccaacacttccagcttgccgccgctggccttacgaccaaaaaggcgtgccggtatcacgcgggtattgttgaaaaccagcaggtcgcccgcttccagcttatccagcaaatcggtaaaaatgccgtgggttaactccccactcgggccatccaacgatagcaaacgacagccactacgctggggctgtggataatgagcaatcagtgactctggcagctcaaaagaaaaatcggcaacacgcatggttttccactttagacgacaaaaacaggccgcctagtctagagccgccaagggttggctgcaagaattaagcaagataacctgctatttggattatactctgcggatgaattttctagctcaccttcatttagccagtttgtccgacagctcgctactgggcaatctgatggccgacttcgttcgcggcaatccgcagcatgattatagccaagaggttgtggctggcatcatgatgcatcgccgtgtcgatgtgatgactgacacgctaccgcaggttaagcaagcgcggctctactttagcactgattttcgccgggttgcgccaatcacgctggatgtcctgtgggatcattttctggcacgtcactgggatgaattggtgccagacatcgctctgccagcgtttattttgcaggctcagcagcaaatcattccgcagctcccgcatacgcctgaacgtttccagaatctgaatgcttatctgtggcccgaacgttggctggaacgctatgccgagctgccttttatcgcgaatgtgttacaaggcatggcgaatcgtcgtcctaaactgtctgcactggctggctcgttttacgatattgagcaacattatcaaccgctggagcaggtattctggcagttctacccacaaatgatgcacaaagcgcagcataaacagatttagcctatcggtaagtctggtatggcttatttgatttaagtcacttgctctttatgtcaaagtgggtatcttaacaagacaaaagatacaaaattaagttattgatagatagaaactatcacagcaattggtatatagacctttattgattgtggctaactccctatgctgtgacgaaagttttatcccaactcgttaatccatccctattaacaggagtaatttatggttctggtaactcgtcaagcccctgactttactgcggctgctgtacttggtaacggcgaaatcgttgaaaacttcaacctgaaaaagcacctgaacggcaaaccagccgtcctgttcttctggccaatggactttactttcgtttgcccttcagagctgattgctttcgatcaccgttacgaagaattccagaaacgcggcgttgaagttgttggtgtttcttttgactcagaatttgttcacaacgcatggcgtaaaaccccaatcgaaaacggcggcatcggcgaagttaaatacgcgatggttgctgatatcaaacgtgaaatccaacaagcctacggtatcgagcatccagatgctggcgtagcgctgcgcggttcattcctgatcgacaaaaacggtgttgttcgtcaccaggtagttaacgacctgccactgggccgtaacatcgacgaaatgatccgtatggttgacgcgctgcaattccacgaagaacacggtgatgtttgccctgcacagtgggaaaaaggccaggaaggtatgggcgcttctccagacggcgtagcaaaatacctgtctaaaaacgcttcaaagctgtaatcaagccgaagtgaaattgggttaaatcctgatttaatcgaataatatcaaccagtcggttcacgctgactggtttttttacgcccatacctttcccagcaccatcgcctctctccttttcttgttactgccccttattagtgcaacgtgatcccaccgacatttttctacgtcacttttaattgtcctgctctccgcgctgcaaaacggctcgcaccgagctaatctgtaaccggttagttaataaacaaatcatttgttattaaataaataattggcgtgatgtttgcaccaaaaggtgttgtgaatactcggcaacaccagggacttaacccgtagatatgtcagagatttatgaaaaataactcattacaggagtcagtatgcttttaaaaaaatggacgatgcctttgactgtcgtagccttgttagttagcggtaacttacatgcagcctctatgccagcagtggaagctaaaaatggcatggttgtttcctctcagcatctcgcttctcaggttggcgttgatattctgaaaatgggcggtaatgcagtcgatgcagcagtggccgtgggctatgctcaggcggtcgttaatccttgttgcgggaatatcggcggcggcggctttatgaccattcatttagccgatggtacagacacctttatcaatttccgtgaaacggctccagccgccgccagcgccgatatgtatctggataaagacggtaaagtgactaaagatgccagtctgtacggctatctggcctccggcgttccgggaaccgtattgggcatggacagcgcacagaagaaatacggtaaattaacacgtaagcaagtgatggaaccggcgattcgtctggcgcgggaaggttttatcctaacgcgtgctgatacagacattctcgataccaccaccaagcgttttcgtgaagatcctgaatctgctcgtattttcctgcgtaaagacggttcgccctttgaaccgggagatagactggtacagaccgatttagccaatacgctagaagctatcgcagaaaaagggcctgacgctttctatcaggggaaaattccacaggcagtggaagatgcatcgaaaaaaggcggtggcattctgaccgcggcagattttgccaactatagaattaccgaaaccgcacctgttacctgtagctatcgtggctataaatttgtttcagccccgcctcctagctctggcggcgtaaccctgtgcgaaacgctgaatattctcgaaggttacgatgtgaaaagcatgggctttaactcagcggcctatattcatacactgaccgaagccatgcgccacgcctatatggaccgcaacaccttcctcggcgatcctgaatttgttaaaaatcctatcgatcgcctgctcagtaaaagctacgccgatgagattcgtaaacaaatcgtgccgggcaaagccacgccatcagaaaatgttcagcccggtaggcaacctcacgaaaaaccggaaacgactcactattcgattgtcgatcatgaaggtaacgccgtttcaaccacttataccgtgaacggccgctttggtgcagtcgtcatcgcaccaggtaccggtttcttcctcaatgatgaaatggatgattttaccgtcaaagtcggcgaacagaacctgtatggattggttcagggagcgactaacgccattgcccccggtaagcgcccactatcgtctatgagcccgacgttagtgaccaaagatggtcagatctatatggttctgggttcaccaggcggttcgcgtatcatcactatcatactacaaactgcgctgaatattatcgatcacggtatggctccgcaggaagcggttgatgcgccacgcattcatcaccaatggttaccggatgaggtgtattacgagcaacgcggtgtgtctgctgacagcctgaaaatcctgaaggaaatgggctataaaatggttgaacaaagcccgtggggagccgccgagttaattctggtgggcttgccgaacgtggcgggcgtgtcgccggctaattcaggcaatgactctgcggtttcaggcaaagttcgggaaggttatctctacggtgccaacgatgttcggcgcccggcaggtgcagccataggttattgataaattagatttatttatatctttcgatttagataatgaaataaagccccacacctgaacgactgttcgataaaacaccccatccgttatggatggggtttatggttaccaaggcaatgcgcgcccctgataatcgataaaagcatggccgcccttacctgctaacttctcaacctgatccaccacgccacgcacgctagtgctaatggttaaaggtgcagcatcaccgcccatatcggtttttacccagcccggatggaaggacaataccgttaatgaattatccgccgtttctgccactaaatgacgtgtcatcatattgagcgcagctttactggctgaatacaaaggcttatgcccgctctcattgctagtaatactgccaagctgcgaggacataaacgccaatacgctgttatgtggcttgcgataaggcaataaatgctcggcaatacggataggagaaacggtattagtttggaataaggccagaatttcttccggtgtcgccttgagagcagattcatgctctgggcctgctacacccgcgttcacaaaaatcagatcaaattgctgccctgcaatctgtggcaaaaatgcctcaatgctggccggctgattaatatccaataccagccagcgagagtgattggcaccggtttctttggcgtgctgacgagtcgtggcagtcaccgaccagccgcgctggttaagttcatccactagacctaagcccagcccacgagatgccccgataattaatgccgttttcttagttgcgctcattgtttatccttttccactcgtattgccgcattgacgcttaatgattagcagcgggaatattcaccataggacaaaaacggcaaggaaaaaagtggagaaatcagtcgctgtaattcaattattttgaatccacggcatttttcgctgtggattatgggctttagtttcatgtcagactcatagagtcagtacttacccactccgcgccacaggctgaagctttctccagccaattgcagatttacattctgcgcattcaacatgagctggctatcaccttcctcacgccgccagttttctacattaagcagcggcgactccggtaaactaatttcagcgccctgaccgcgctgcaacgcgatcaatactcgctcctgtcggtaagtgcgcacaaacaccagtgaatcaccactggcgaacaccacctgacagccaccgcgccgtagcgctatactttctcgccgcagggcaatcatgcgctgactcaactcaagcagttgtcgatcccactgattttcatcccacgggaaggttttacggcagaacggatcgttttcaccgtctaatcccacttcatcgccgtaatacaggcaaggcacgccgatccagctaaacaaccagcctaaggccattttcatgcgggattgatcgcctttcagcaaactcataaaacgagcggtatcatggctatccaactgattaaataagcgtagctggcagttatgggataaaccggtgcggtagccgtccatccattgaacgcactcagccgcatccagcgttatcgggtgagcagcaacgtcaactccggccaaaaatgcccgaaccggtaacgcaaaccccatataattcatcgccgaatcttcaacgcctgcctgtagccagttacgcgcatcaccaaaatgctcacccaaaatataagcttggggattttcttgtttagccgcctgataaattcccgctaaatggcgcagattccccttggccccccccctgctctccaagcatatgaaccacatccaaccgccagccatcgatactgtacggcgggcgtagccaatgacgcactacgctatcatcagcctggtaaatctgattcaccacgccatcagcggcaaaattcagcttcggcaagctacggttgcctttccagtccaacgcctgcccgtcgggatagaagttaaaccagtcgcgataaaccgattcgacatcgtggcaggcgccaccggttccctgttgatgccggtcaaaccagatatgggaatcaccggtgtgattaaagacgccgtccagtaccagcttgatgcctgcgctatgggttttttcccgtagttgcagaaaagcctcattaccacctaaatagggatcgacctgataataatcttgcgtgtcgtatttatgtacgctgggggcggtaaaaattgggttcagatacagcgccgtcacccctaaattttgcagataaggcaacttttggcagataccggctaaatccccgccgtaaaatgtggaagacgcatgaatgtcttccagcggctcatcccactctcgccgcgccaccggacaatcggccgcatagtggaaatagctaccgttttgcacgcagtgactgccctgactactggcgaaacgatcgggaaatatttgataaaaaatctgatcggcaacccaatccggccccgagtcaggtacatcaacggcaaactgcgccagctgagccggaggcaccaccgaaaaacccagcggactaaaccattgctggcgatcggcccagagcaatttaaaacaatagcggcgagtcggctgcccttcacgcagtggcaaagtcccgcgataacggcgaaaaccatcgtgatcgcgacctttcatcgtcagcagccactcttcattatccggctcacagcgcaaaaaaacctgctccggtaagtcatcaccctgtaaccatagactgatgtgtaatgtgtcatcacgtaaatgtatgtaagggggaaccggtaaatgccaaccactaagcatataactctccactattcagcataattatcgcgcgatctgacccaagagcgcctatagcatcgataaagtgacccaatatctcaatatgccaacgatgccatgttgctggtgcaatcccctcatctgtcagcataaatatcagggaggagccggggggaggaggaagcagaaacaagctttacctcaggtatactgcccgctgatgacaaaataaataacagggagaatgccatgggcgtagcggattatctggataagattattgactgggccaataagcgctcagatattaccgcactgattctgaccggttcgctggcgcgtcaggatcggatgatcgacgaactttcggatatcgatattgaaatcattgccgaacgaccgcaggatctcctgaaaaacagcgactggatcggcgagatcggagacatactgacctatctcccgctcgatcccgatgaaaatcaggcgtgggcaacccggctggtgttctaccgcgatggaaccaaggtggattttaccctcgcagatagtacgcggctgcaaaccatgatcgatgccgcaacgctggactcgctgtaccagcggggctatcgggcgttactggataaaaatggcgttgcttctcagttacctgccgccagcggaataagccagcaacccccattgcccactcaaaaacagtttcaggccagcgtcgaggaattctggtttgaagccgctcatattcctaagtatctgtaccgtggggagttatggacggtcaaactacgagactggaccatgaaggagctattactacagatgatggaatggcaagcactggcaaaatcaacatcggacgtagatacctggcatcaaggtagccatatgccgcagtggctggcaccacacatatggcaagagctgcaccaaacctttggtcaatttgatgcggacagcgcccgccaagccttttacgccagtattcagctttatagccagctggcgcgtaaagtggctgaatcactcagcttaaagtatccgcagcaggtcgaagatggggttttgtctctttgtaaaaaaatcgaaaaactgcctaaaactaaccgaacgcattaaaacgtcacccataaaaaaaccgggttattagcccggttttctggatgtattcaatcggcaaatattatttagataatgctaccgacgcagcctgttttttctgaaaacgcactttcaggtagtagcccgccaacagcaaggccacccatatcaggccgacatacagcgaaatgcgcgtcgttgggaaataaccaatcaggccgataataaatagcaggaaaataatcccagcaaccgaggtaaacaccccgccgcgcagagggaaatccaatgctttaacctgatctttggtcaatgaacggcggaaagcgatttgggaacacagaatcatgatccacacccaaacggtcgcgaaggtcgcaagtgatgcaatcaccaagaagacattttctggcatgatgtagttaagataaacggcaatcagcattgcccccatcatcaccaacaccgtcacccaaggcacaccgcgcttagaaatcgcaccgaagactttgggcgcgtggccttgttcagccataccgttcagcatacggcccacgccgaatacatcgctgttaatcgccgataaagacgcggtaataaccacaaaattcaggatacctgcagcaatagtaatacccaaatgctggaacgtcagtacaaatgggctaccgtgagtgccgacctgattccacggataaatcgacataatcacaaacagggtgcccacataaaacaccagaattcgccacggcactgagttaatcgctttaggaatcgattttttcggatcttctgcttcaccggcggtaataccgatgatttcaataccgccgtaggcaaacatgaccagctgcagcgacagcatcatgccgacaaaaccgttactgaagaagccgccgttcgtccacaggttatgaattcccgtcggttgcccgccgttgcctatcccccagacaataatgccgataccggccaaaatcatgatgatgatggtggcaactttgaagaaggagaaccagaactccagttcgccaaagaccttcacgctcatcatattgatcgcaccgataatcaataccacgctcagcacccatatccaatgaggcacgtcagggaaccagacgcccatatagataccaaaggcggtcacatcggcgatagcgacaatcaaaatctcaaagcagtatgtccaaccggtgatatagccggccatcggccccagataatcctgcgcataacgggaaaaggagctggcctgtgggttattcaccgacatctcacccagtgcgcgcatgatgataaaggcgacgatgccgccaatcagataagccagcaacacgcttgggcccgccattttgatggcgtccgccgagccgtaaaacaggccggtaccaattgctgaacccaaggccataaaacggatatggcgagtagtcagcccgcgttttagcttatttttgactggtaattccataacaatatcccgtcttctttcagcaaaaagccacgagcaaaggcgcgtggctaaagatactctcttctgcggcaattactgtttggcagtaactcgttgacgtccacaaatgcgatcgtagaccgctaccaccaccagaatcaacaaggaaggtggcaaccaagacaggccttggcccgccaacggtaactgttcagtccaagcaggcaggaaatgcgcaaaggtcgatgtcttgattccacccaaaataccgaacaacaggctgaccaacatagttggagccacgatacggctggcattacgccaccaacgcagagtgaagctcagaatcaccagcacaatacacggaggataaatcgccgtcattactggaatggaaatttgaatcaaatggctcagccccaaattggataccaacatggagaaaatgcccagaatgaataccagcgctcggtaagacaacggcagatattggctaaagaattcggctaaagcacaggtcaggccaaccgcagtgaccatacaggcgatgaagatgagcgccgccaggaacatactgcccaaaccgccgaaggtatgctgtacgtaagcatgcagaatcactgcgccgttttgcgcatcaggtaccaacgtaccgctgctgccacccagtttgaacaggctcaggtaaaccagcgtcagacccacaccagcgattaagccagcccaaatggtgtagcgagtcagcaagccggaagaaactacaccgcgagaacgcgcagcattcacgataacaataccgaataccattgctcccagcgtatccatggtcagataaccattaacgaaaccggaagagaaaggcacttgctgatagatttcggttgcaggaatctgcgggccagcaggccacagaaccgcagcaacgcccaaaatagccagtgcagcaattttcagcggagccagaatatgcccgacggtgtccagtagacggcctgggtaaagcgaaataccaataaccagcgcgaaatagatcaggctataaataaacaacggcaatgggccatcgccagtcaacggagcaataccaatttcgaaagaaacggtcgcagtacgcggagtagcaaacagtgggccgacggccagataacagacggtcgccaaaaccaggcccgcagtacgaccaattggcgaactcagcgcatcaataccgccaccaacgcgcgccaatgcaataacggtgatgaccggcagacccacggcagtgatcaggaagccaagtgcggctatccaaacgtgctcgccagactgaaggccaaccataggcgggaaaatgatgttgcccgcgccgacgaataaggcaaaggtcataaaacctaatgccagtatgtctttagatgataaacgatgactcatagtggttgtcgtgttgcctagttaaaaggaccaaaaaggaaaaccctgggttgttgtctttccggctcgatcgaaaacgctataacgcttcacagagagcgctaatttccgactaatcggtttcgatgatttgcagtgtttttgaagttatatgcagatggaataaaccaacaacgggggctaagtagaacgtttatagcggagaaaggcaagtctggatcggaaaagcagagtcatcaaccagataattcttcaatactagttaaacatgtcggttattgagaaatacacgccatatgatttgtatcatttttaatcaattattagcattgggcggccttcaccgcccaaaaactcaccaaatgtcgttagcaatatcgactaccagcctgagttttttccactgatcctgctccgtcaggctattcccttcttccgtcgaagcgaagccacactgtgggctaaggcagagttgttcaatatcgacaaatttggccgcctcggcgatacgttctttcaccgcctgcggttgttccaaggtgccatttttcgaggtaatcagccccaaaaccacctgttgctgccccggtttgataaagcgcagaggttcgaaaccaccggcacgttccgtgtcatattcaaggaaaaaagcgtcgacgttaactgtgccaaacaatattttcgctactggctcataaccgccctctgaaatccaggtcgagcggaaattaccgcggcacacatgtaaaccaatagtcaaatccgccggcttgcctgccagtgccttattgagcacctgagcatagatctgcgccaactgctctggatcttcaccacgctctctgatctgacgctgctgatcgtccgaacacagataagcccacacagtatcgtccaactgtaaataacggcagcccgcatcataaaaggcctgaatagcatcacgataggtctgagctaaatcgtcaaaatacgcggtcagatcgggataaacctgcttatctatagcgttacggccaccgcgaaaatgcagcacgctcgggctggggatagtcattttagccacggagtttccggcaatactttgtaaaaaaagaaaatcctccagcattggatgggatttaaagcccagtttgccaaccactttgatactgcgagcgcgcgtctgaacgccgttaaactgaatgccctgctcgacatcgtaaccttcaactccttccaaaccttcgaagaaatcgaaatgccaccaggctcgacgaaattcgccatcggtcaccaattgcagccccgcctcctgctgctttgccactatgtacctgatttcgttatcttcaatttcgcgtaactggctagcgctgatatcaccgttcaggcgctgctggcgcgcctgtttcaacgccgcaggacgcagcaaactgccgacaacatcggcgcgaaaagcaggggtcgttctttgcataacaggctccagatcctataccgccgactaaagccgccacggcacaaataatttaccgaatggatagtttctttgagttacaaatagacatccagacgtccaaataaattgactggagagtgtcatctcaccgattttgattcaatagaggaattttcactgcatatgaaataaattcatatccaactaaattagtgggtaaatcccagcgctgaacgggcctttttcaagctttcttgcgataaggggagatagccgtcacgactcaccagttcttgcccttctggagatagaattcgctgcaagaacgccgccgttagcggttctagaggtttatcaggggctttattgacgtagatataaagatagcgggacaaggggtaacggccatttcgaacattttcggcggttggcatgacgtaatcctgccctgataccgacaaaggtaataatctgacgccactggcgcgaaaaccaatgctggcataaccgatactgttcagcgaggttgcgacagcctgaaccaccgaggctgaaccaggtaattcattgacctggctgcgaaaatcgccgccgcacaaagcacgctgtttgaaataaccgtaggtgccggaagctgagttccgactataacgctggagagaacgcccagcccacgggcctttcagcccaagatcagcccataagtttactggcttattatcaccacataattgattttgcgaataaatggcgtccagctgtgacaaactcagccccaccagcggattatcctgatgcaccagaaccaccaacgcatccaccgccacaggcacggctaaaggaggatagccatagcgttgaacaaaagcggcaatctcggcggctttcatcggacgactcatcgggccaagttgagctgcacctgcggccagagccgtcggtgcggttgacgaaccggcggcctgaatttgcagattaatactcggatactgatgattgaaatcttccgcccacagagacatcagattcgccagcgtatcagagcctacgctggaaagattaccggaaagcatcccaaccggtgcctgagcaaaaaccggagtgctgacccataacattgcacccagtaacgccgttttgctccatttcatcatcagaatatcgtccgtaaagcctaggttttgaccgcattctcagctaaaaccgtgggaacaatcaatcgcttcggtaaggtgaagacaaaacgcgtccccaaaccaatttcactcatgacctctaaacgcgcatcgtggtgactcagcgcatgtttaacaatcgccagcccaagcccacttccgccggtttgccgcgaacgggctttatctacccgatagaagcgctcggtaagacgaggaacgtgctccggcccaatgcccggcccgttatcactgacctgaaactgagcgccctgcggcgtcaattgccagcacacttcgatttttgtaccggttggcgtgtgatttaccgcgttatacaccagattggatacggcactgcgcaactggtcttcattaccaaacactttaagctgttcattcacgcggaaagtaatctcatggcgaccgctgcttaacgcctgaacctcatgctgtagtagcttcagcatcagtggaatatccactcgctcattcatatccacatttggtgctgcttcgatttttgataacgtcaataattgcttcaccaaaccgtccatccgtttggtctgctcttgcatggtattcaaggctttaccgcgcaatgccgcgtccagttcctgatcgtgcatcatttccagatagccttgcagtacagttaacggcgtccgtaattcatggctaacgttggcaaagaaatttcgccgcgcgccttccagttgacgcatttgcgtcacatctcgcgccaccatcagtaattgcccttctgaataaggcataacgcgaaactcaacgtaatggccattattaagctgcacggtcaatgggcggctgaattcctgctgttgcagataatgggtaaattccgggtaacgcagcaggttaagaatgtgctggccgttatcttccggccaacgaaagcccagtaaattctgcgctaatccattacaccaaaagatatttccctctacggtcgtcataaccaccgcatcgggcaaggattcagcgccgctgcggaaacgttttatcaacagcgccagctcacgccgccgccgccgattacgcagttgcatctgataaagaccataaaacagcggctcccagctccagcgtccggccggtggcgtcatgcttcggtctaaccatagccaatgagaaagtttaagctggttataaaaattccagatcagcgctgccaatactgaaaccagtaatagccaagggagataaccaatgaaaagcccgagcaatagcgcgggcagacaaaaaagtgccagctcaatagccagccttttccatgataagcgttctagcacgacacattctccggcactacatacttaatagcgcgttgagaaacggtatccggtgccccggacggtttgcaccattttgtcatgcccttcggattcaagcgccttgcgtaaacggcggatatggacatcaacagtgcggtcttccacataaacgttagtgccccaaacataatttagcaactgctcgcggctgtaaacccgctccgggtgagtcataaagaaatgcagtaatttaaactcggttggccccatgtctaacgctttttcgttagccatgacccgatgagaagaaggatcgagacttaacccttgcatttcaatcacctcttccacggccatcggtgaaattcggcgcatcaccgctttgattctggcaacaagctctttgggagaaaaaggcttggtaatgtaatcgtcggctcccacttccagcccgcgcacccgatcctcttcttcaccgcgggcggtcagcatcatcaccggaatatcccgggtcatggcttcacgtttcatatgcttgataaactgaatcccagagccgcctggcaacatccagtctagcagtaccaaatcagggaaaggctcggacaagcgcgtaaccgcgctgtcataatcttcggcttctaacggttggtagccgttttgctccagcacaaaacacaccatctcgcgaatcggcgcttcgtcttccaccaccagtatgcgtcttgccatcgtcaatcctgccaatatgttagcggttgctatttgatttccgcgccattatgcgtcagttttatgacagttttatgaaaaaaaccatccctttgcagccaataagcatagcggctaaccgaaagggtgttgcaaggttatttcagcaactttgcgaagccgttctgggatttcaaccaatcctcctttttaaccgcgacatccccttctcaacgtttataatcagcgccattgattacctgccctagcgggagttttatgcgcattatacatacctcagactggcacttaggccagtatttcttcaccaaaagccgggcggcggagcatcaggcttttttacgctggctaatccaaaaagttgaagaacatcaggttgatgcgttaattgttgccggcgatatcttcgacacaggttcgccaccgagctacgcccgcgagttatataaccggtttgtggtcgatcttcagccgacgggctgtcagttagtggttcttggcggtaaccatgattctgtcgcaaccttaaatgagtcacgcgaactgttggcctatctcaataccaaggtgattgcccacgccagcaacgatctggaacaacaggttttcattctacacgatcgtgaagatcagcccggagccattctgtgtgcgatcccttttctacgcccaagagatctgatcgccagtcaggcgggagaatccggatcgcaaaaacaattagcactacaagaagccatcgcggcacattatcagcagctttatcaaacggcggtcaacctgcgcaagcggctagcattacccttgcccattatcgccacgggtcacttaacgaccgtaggcgtcagcacctccgactcagttcgagacatttatatcggcacgcttgacgccttccctgctcaggctttcccccccgctgattatatcgctctgggccatatccaccgcgctcagcaggtagcaaagtcggagcatattcgctatagcggctccccgattcctctcagttttgatgaactgaataaagagaagagcgtatttttggtggagttctcagggcaaagccttgccggggtggagactctgactgtcccgcagtggcaaccgatgcaattaatcaaaggggatttacggcagatagagcagcagctcgctgcctttagccaactttccggcccaccggtatggctggatattgaagtcgccacccaagactatctcagcgatattcagcgacgcattcaggcattgacggagaatctcccggttgaagtggtactcctgcgccgcagtaaagagcagcgccaaaacagtattcatcagcaagagaaagaaacgttgaatgagctaagcgtcagcgacgtattcgaacgtcgcctcgcgttagaaacggagctgaccgaacaacggcagcagaaaatgcgggaaatgtttcaacaagttgtcgatgaagtcacgctgaatgccgatgcaagagaagaataagtatgaaaattttaagcctgcgcctaaaaaacattaactcattacaaggcgagtggaagattgattttaccgccgagccttttgccagtaacggtcttttcgctattactggctcaaccggtgccggaaaaacaacgttattagacgcgatctgcttggcgctgtatcaccaaacgccacggataaaagtctcacccagccaaaatgagctcatgacacgccacaccgctgagtcactggcggaagtggaatttgaggtaaaaggcgtcagctatcgcgcattctggagccaacgacgagcaaaaaactctcctgaaggcaatctgcaagctcctaaagtcgagttagccctatgcgcggacggtaaaatactggcggataaagtcggtgataaattgtcacttatcgcctcgattaccgggttggattttggccgtttcactaaatccatgatgctatctcaagggcagtttgccgcctttttgaacgccgatgctaacgatcgcgccgagctgctggaggaattaaccggcacagaaatttacggtcgcttatccgagcaggtctttgaaaagcataaacaggctaaagccgagctagatgccttatatttacgagccaatggcattgagctgatgaatgaagaacagcggcaggatttacaacaacagttagacgcgctgcatcagcaggaacaacagttcagcgtcgaattgctcaatctgcaaaatcaggtcgcctggattacggttttgcgccagttgcaacataatgtgcagcaatacgctcaacaacatctgcaggtggaagaagagtatcaacgggttcagcccgatctccagcgtttggcgcgcagtgaacccgcagaaaaactgcgtccattgcaacaagaacgggatcgctgcctgcaagattggcagcaagcgcagcaacatatcgcaaccttaaaacagctgcaacagcaacaacagctacagctctcgccgctgacgctagccttggagcaggccaccagcgcccagttacagcacgctgaacgacagcgcgagaaggaaacactgattgaacagcatataattcctttagacaaccatattgccgctcaacggaaaaccttgtcgcaactcgatgaggataaacttcaacagcagaataaaacgcagaaaagccagcaacagcttgaacaagatgaacgcctgctaatggaaactcatcaggggctgcaacagttagctgactacattcagcaaaatactcatcatcaacattgggaaaagcatctgccgctctggaaagaacagttccgtcaacagcacagccaacgccaacaactcgctgataatcagcaaattttgcaacaacaagcggcgcagattgttgagctgcaacagaaattcgccgtactaagcgctcaaggcgtacagcagcaagctgcattggcgcaagccacaatgcaggctgacgccagcaaacaacagctggaggcgctagaaaaacagcaacctcaggcacaattgcgtcaacggcttgctgaacttggcgagcaaagaaatacccgtcaacggctcgcagccttatcgccgctggctctacagctacaggcccaacatcagaaaaaccaacaatatctgctcgatcaaaaccagaaactggtacaactcgagcagcagctgatagaaaaaagacagcaatacgcccaacaaaaacagcaccttgctgatttggaaacgctatgggatcgcgaaaaacagattgtgacgttggcggcagaaagagccaaattgcagtcaggaaaagcctgcccactgtgcggatccctagaacacccggctatagccgaatatcaagcggtaaaaccgtctgaaactgcgctgcgcgtggaggcactacgtgcgcaggttgatgagctgtctaagacgggcagcggattaaaagccgaaaaagaaaatctgcagcagcagaaatcacgtctggaacaagaattacgacaaagtggtctgcagttagctgaacatcagcaaaactggctggcgctgaccgcgcggctagctctgaatttcactctggatgaaccggctcagttaactgcgtggctagagcaacaggagcaggaagagcaagaatatcagcagaaactgtccgaatttgagcgactcaaccaacaatatcagcgagctaaagacgcattggttcaagccgagcagaatcagcagaagaacctgagtgaagtcggcctgcaacaacaacgcctgcaaaacattcagcaatctcagcagcagttacagcagaccgaccagcgtcagcaggacgaatatcgactgcagcaacaggatttcctcaatacattaatcaatctcgatctacagcagccggagccagagcagcaaactgagtggctagatctgcgggaatatgaatggctgcgctggaagcagaatcagcagaatcagcaacagctggtattacaacaaaaaacgctggaaacgcggatagaaagcgaacgccagcgccaaaaagaataccgcgaccaattattgaatattgagcaaaagctcagccaggcaaaccgtgcgttgcagcaatatattcatcaacgtcaagagctgtttggcgataaggttgttgccgacgaacgacaaaaactgcgaacagagcaacagcaaatcgagctagcgcaaaaggccgccaacgaagcactgcaacagttgcagtctcagttgagccgattgggcggtgaattagctcaactggaacagcagttgcagcaatatcagcagaaggccacccaaactcaggccgaattccaacaggctcttgccgccagcgagtttgatactgaagtcgcttttgcagcagctttattagatgaaggccaacgccactctttacttcaactgcaacagcagttgaatgaacgcttgcaagaagcagtaatccgcttgcagcaagcgaatgacagcctcaaccaacacctgaaacattgtccgtcaggtatctccccacacagcgatttatccgaacggaaaggaattgcagagcagatggctctgcagctaaaagctaacaccctgcgtcagggggaactgcgtaatcagttagagagcgatacacatcgacgtgccagccaatcagccctgttcgagcagatagaacataaccagcagcaatacgatgactggaactacctcaatcaacttattggttcaaaggaaggcgataaattccgtaagtttgctcagggcttgactctcgatcatctggtttatctggctaataaccagcttaaccgactgcatggccgctatttactccaacggaaaaccaatgatgcactggagttactggtcgtagacacctggcaggccgatgccattcgggatacccgcacgctttcaggaggtgaaagcttcctggtcagcctgtctctggcattagcactttccgatctggtcagccataaaaccagtatcgactcgttgttccttgatgaaggcttcggtactttggatgccgaaacgctggataccgcgctggatgctctcgacagcctgaatgcgacgggcaaaaccatcggtgtgatcagccacgtcgaggcaatgaaagaacgcataccggtgcaaatcaaagttaagaaaattaatggattaggcattagcaggcttgataatgcttttgcagttaattaagcgcagagttatggaaagatgaagcaagaagcagccaaaatccaagctcagaccgtaagattacttcatatcaactcgtgaatgcctagtgaacgttgaatctagagtttgtggcattaggtaaattagcaccctttgctattaatctaatgccgctttcgccaaccaatagccgcttattacaggttgagaaaagcggctattcatattctctaatacataatgaaattaagcgtcacatagagatctagcatgtattgggtattgggtattgggtattgggtattgggtattgggtattgggtattgggtattgggtattgcgcataaatatagccattgatggacaaaggcaacggacgaggctattagccaccaaactgccctgataagattcctgatatgcctgtagccgcccgaaggagcgacagtcaggcaatcacactattgctgtggccacagccatgcagcaccacgcacgccgctggagtcaccgtgtatcgccttgtgaatcggcgtttcacactccccgccgaatacccacggacgtatcaaatcaggcaatgtacgatacaaacgatcgacgttactcataccgccgcccaatacaatcacatccggatcgaacaggttaatcacgtgagccagtgatttcgcgaatcgttgctcatagcgttgcatcgcctgctcggcaataacatcgccttgttccaccagagtaatgatttcatgtcctttcaagagattgccgcttaaacgaaaataatccatagcaaagcccgtacctgacacaaaggtttcgatacagcccttcttaccgcaatagcagggaacctctaattgataacgttgttcatcctcatcctgccacggcaacggattatgcccccattcaccggcgataccgtttccaccagaatgaacacgcccgccaatagcgatacccgacccacagccagtaccaataattgccgcaaagaccaaatgtttccctgctccggcaccgtctgtcgcttcggaaacagccagacagttagcatcattagccagtctgaccggacgggcaagcaagtcagataaatcgcgatccaacgtctgcccattcaaccataccgaattggcattttttactttcccactaaagggggacaaagtgcccggaatacctacgccaacgcttcctttttcgccagtagctacctccgcatccgtaaccaaaccggcaatagccgataacgtttgatgatagtcatgacgaggcgtttcaatccgcttacgaaaaagctctcgcccatcattcgccagtgcaatgacttctatcttagtaccacccaaatctataccaatgcgcattgcgcctcacctcattgagctgatgactttattttcagcgaaattttttaacggagtcacgcatcattccgcaaattcagacgtgccgattattagctattgcatactagtttggacaatcattaggtatctcacaatctttgcatttatctatttgacgctaccgacaatttaaataattcatcaccctcagcgagccatgcgttgtagtactttttcacgcaatatttcgattcagcccccaattcatcacgctattttgctagggactgcggcttcaattcgttatcatgccgccctgcgtttgattaacacgcgtgctttaagcgcgcccgagcttgggataacactatgctgtggtttaaaaatttaatggtttaccgtttgagccgggaagtttcactgtctgcggacgaaatggaaaaacagttaagcgccctttctttcaccccttgcggtagccaggatatggccaagaccggttgggtgcctccgatgggctctcacagcgatgctttaacccatacagttaatgggcaaatcattatttgtgcgcgtaaagaagaaaaaatcctgccttcaccggtgattaagcaagagctacaggccaaaatcgagcgtttggaaggtgaacagcaccgcaaactaaagaaaacggaaaaagactcgttaaaagacgaagttctgcatagcctgttaccgcgcgctttcagccgttttaaccaaacattcctatggattgatacggttaacgatttgattatggtcgatgcggccagtgccaaacgcgccgaagacacgctggcgttgctgcgtaaaagcctgggttcgctgcctgtcgtacctttaactttagaaaaccctatcgaactaacattgaccgaatgggttcgctccggtgaattacctgccggtttcgcgttgatggacgaagcagagctgaaggctattctggaagaaggcggcattatccgctgcaagaagcaggctttagtcagcgatgaaattgcggtacatatcgaagcgggtaaattagtcaccaaattggcacttgactggcaagaacgcgtgcaattggtgctgtctgacgacggttcgctcaagcgcctgaaattctcagatacactgcgcgaacaaaatgatgatatcgatcgggatgatttcgcccagcgtttcgacgccgattttattctgatgaccagcgaactggcagcattgatcaaaaacctgattgaagctctgggtggcgaagcgcaacgctaagtttgccgcgcatttgaagacgttgccccctctggcatggagagggcaatattttgattagcttaggtatttacacagataagcagaggcttctgcaacttgcaggttaaattcactctgtccaggaatgtaaaaagtttctcccggcataaacacctgccagtcaggagagcctgggatcaagactttcaatgccccagtaattaccgtcatttcctcgggttgggcggtactaaaagtgtattccccttcttccattaccccaacgctcgcgcgcccaatgctgctactgtcataaccgatggacttcactttcccggtaaaatattcattaaatttcagcatagtttggcacccgcatcctaatcattgatgagatttcatattagggtcacagcattgattctgtcactgattattacgacaaaatgcgatcgcaagccgattcactggggtggttgctgataaagcgtacaatagaggcaaaaaaaccggggcaatcgaccccggtgatgataacaacagaagaattatctaatcacagcgttacataatcagttcagcagccagcttcgccaccagcacgtttgataacaaaaccggtattccgagccgacgctgtaaaaaatcgcgatgtttttggtgatagccaatgcaatccagcacaacaacctgtgccccctgttgcagcagcgtttgcgcagcttgctcaagtgcctgctcatcggccaaataagggctggcgatggcaaaacagggaggtgacgccagcatttcccacttggcggcctgctgttcgatttgctctgagagtggcactacgatcccgacctgatgatcgctgacaatcgccgcgatcaaaggcggaatgatgcgatccggctccagcagcagtgcctctcgggttttcaaatgatgaaactgcccggtgcatagcagtaaaataatgcgacatccctgcgcttcaagttgctcaattttctgctgtaaaccgcgttccactttgcttgcagccaaagaaacctgagtgccatcgctcaaacgcgaaaccagcacatggtcgccgcgctcaattggctgatattgttcctctacctgtttccaatccagcccatccagcaggccaatatgtataacctcatccgacggtaggtattgggataacagcggcataatatcgctgcgcggtgcctgacctagggttaatgttgccaatgacgcattcatagcgcggcttcgccatgttcgggatggcgttgttgtagatgtatcaaagagccataaagtgcaataagccgtgcatattcggattcgtcataaaactgacaggttccacggccaaactctttcgctacttctacggcaaattttaccgcgagcgcgatatctgtctcatggctggcaccggttccacagccgggtactaccgactgagtacaaatggcgacgccaaccaccggcgctgaagtggccgttgagggctgcataatactgtttaggtgatgcacaccgttaccataaggagtgatatctggaatagtaatagggaatgtaacggcatggcttccgctggtcatctccataatacgcagcaaatcttcggcaacgcgcaggatataaccttgcttaactgtaggggataacgcatagcctttataattgatgatgcgattacctttagtggtatcaatcgataaaatcgcatcggcttccagcatcacctcgttatcattcatggtgatgtcatcaataggggaatccataaaatcgacgggatcgtgtggccgagttggcgcattggggcaaatgtgagtggttatcaccacatcaccggccaaaatatcgcctttactacgcatttccgccagtttaagcgcgctggcaatggctgcaatggcaccgtcagcatcagaaaccacaccaatgcgttcaggccgcgcaccaataccgcccaaacggccgataatgcccagcgttggcgccgtgccacccagtgttttacccgcacttcccgcaatctctattcgtacaaaatccgtgctgccttttggcccagtggcgcggaccgtgctggccttaactcctgaataatcaacaaacagttccacgatatcctgaccagaaacatgggcactatcaatcatttcaaaaacgcgtaatgtttgttgcaagctcatcaggactatccttcatcattaggtctcagcaggcagcggcatagctatttgcccttactggataaaatggagctaaagaagttgtacaatgcgtcgccggcaataaaacctgccgccataatttgcattggtgtacgccccttttcaccccaacatttagtaatcaaaatgcgcaaagcaattcctagcaccacagcccaaccggctagcgcgttattgatcagtaatcccgtcgccagcagtatcccaagttgacgttttgggccgccaatcaactgaataattgcgcctggaatagcccaaatcatcaggctaaacgcaatgcctggctgcgcaccggcctcaatggttttggcataaacgcgcgccatcggcggcactaaatcctgtgcgaaataccccatatgagtgaaccacaccaccggaatggcgataacaaaagcaatcagcgccgcaaataactggattttccgccctatcagctcctgcttcagatctttaccgtatcctcgcagaataaatccggctttcagatcaaagcccatatcagcaaaagcaggcccagttgcagctgtaaaaccggttaagatgcataatgccaacggcggaaagccgatcaaaataccgacgatcagtgtgatcaaagcaacggcaaaagctgggaaccaaccggagtgcatagctgcaatgccaacgatcagttcgtgaataaaagcggcaaaagcggcataaaaaataaaaccgatcaacatgccggtagacatatcgctgtaaagcccaccagccagcgccagcaaggccgcaatcacgacataacccacggcacctataccgagcgctttacgaacctccgttgccggttgggtatagttctttttatccgatactttcttgctacgaatcacctggatgacctgaatcagagccacaaatcctgctccgaccatcactccgtggggaatataattggcattaatatcaaatccgataagcggttcaatataggcacgaatcaataatcccacgccaaacatgcttaatgcccaaatattaccgataaaggcggtgccaaaagcggccatcggaattttgaatatggccccgacgacgccaattcccacgccgacgaccaacagccaggcatgacggccccctttgtcaccggctttaatcgcttctgctgctgcaacgcccggcggccaggcattctctgctggaaaaattttggtatcgaataatcgatagagtaaataggcatccagtaacatcgcggcggcgacgccacaaaacatcggtaaaattagctctggctgccccataacataaggaacagcaataggcatcaacagactatttgcagcaccaaaggttgccgacgaaataacagtttgtgccaggttttgtgtatgaatggatcgatagcgttgaaaaaactttagagggatacgagccaataacatggcaaataatgcaccaatgattgaagtattgggtgtcacccctaaagttgtaatcaattggacgccaataattgcgccaatactagaaagaaatatcatcactaccagcgtgccgatatcccttagttgattccctgatgtttgctccatttttatctccctgagttccgctggtgttagcgctagctatcaaataacacgataatattagttccctggtgaggcgctaattaggttattattaatggccaaactcctatcaatggagtttatttggctcacaggtcttcccatggagaaataaagcaaataaaaaatattttttaaataaagttaaaatttgcaaatcttagctagctataaattattatttttcaaccagtaatcatcatttaatttctcagctaataatctggttgtagaaattaatgcttcaacatattcactggggtaaaacgggggttcatccgaactcggaaaagacaaacatagcccaatcgtttcactgcgatgcttattgctgatattggtcgctattgagctaacgccttgtaaagtctcattacgagcaaaagtccagccgacctggcgcgccgttgccaacttatctaataatgctgccagattctgcggagcattggcagagcgtggtttataagagccaaaatgttcacgaacctcatcgtcactctggcgagccaaaatagcccgacccactgaggtttccgcggcaggagaacgggtaccaaccggcgtaaccaccggtaaaaattgttgcccctgaaacattcgcaaaaccataatttcctgcccatccaacgcagaaatataaccggtgcagcgcgttatttgactcaatttaatcatcattgaagccgccatatcgactaaaggcgtagagagatattggctggatattgataataataaacgaccaatatgatacaaccgcgtatccggatctcgctctaataaaccttccgattccatcgtcattaataaacgtgacgtcgtactttttgccaatcctaattggttaataacatcgctaaaggaaatacccggatgagcatgcatgacgttttgtttggaaaataactttagtactgccgaagcattttctaatgtgctcattttaaatgagttccaatatatgaaactaagttcccgattgaatgaaataaaactagaatccttctgtcatatcgtcaagttttttatttaatttaaaatacaataattagctaacacacatactttataatgaaaaattgaaatttttatcgaagtaaaacgaaaaaatacaagtttaattctcattaattaattagtggcaggataaagctctgataactacaaagatgtaattactcaaaattatgaaaataatgctctgatatttaattacctgtagaaactaaataacgcctctcttacagagtctttgctgaaaatatgggctttgctgaaaatattgactgaaaccctgttcacattttcagtacaaccgaaagtcaggcggataagttagagattacgtaagatataaacggccagtgaagcttcaaatacaatgatggagatcgaccagaaagccggcatgaagttacggtgttgacggagataaagcttgatatgtctcatcagcctcgccttaattggcatccgatgcaggtaaacagaggatttacactgaaattattacgtgggatataattgtactcttgctatacaattcagacaataatgacgagaaaagtcacgacaaaaacatgccactcccctgactgacgactctagtgaggaaacaccgttgatagaaatgaaaaacggcgataaatcgccgttttaactcagattttcacctgtagtaaattatttcaccgtggcatcagccaataattccagaatttgttgtaccactgactgtggggcctgactggcattaagaacataatgggcaacctcttgatacatcgcctcccgaacagccagcacatcctgtatttcttcagcaataggtttaccagtcaaactcggccgctgcgcgtcttcaggctcctcggctaatctttcggccagaatatccgccggcgcacgcaggtaaatcactatcccctgacgacgcataaatgcccgattctctgccgcgagtaccgcgccgcctccggtagccaccacggttttaggtacggtaacttcctgtaataccaaactttcccgcagcctgaaccctttccaaccctctttggctaccacttctgccaccgtgagctggctgctttgctgcataaataaatctgtgtcgataaattgatatcccaacgcctgcgccaacgctttccctatcgttgttttacccgcaccgcgtgcacctaccataaagatagttcgagtcattgcctgatcgtccttttgcatcaaattctctggataaggtttatgcattaaaaaaccggtcaccaccatggaccggttccacagaaagtaaacatttgctggcttatcgacagccaaagcgaatcatacctgtaattaggagtagtgcaaactttacgaaaccgtaaattatacgatacaccctatttccaattacccctcaataacctgaggggcattttgtatcaaaaatctacgctggctctcaacacaaactgccgaggctcgcctatcgccacgcgataacggttaccgctggaaggatagtaggttgtatcgaacagatttttcacattaagttgccatttcactcggtaatcctgaattggcaaggtgtaagcgataaaggcatcggctacggtatagtcgtccagagtaaagctgtttgctgcatctcccgcccgctttccgacataacgcacacctgcgccaacccgtaagtcgtccccaccatacagtccggtcgaacccatttctttggtcaggaacaaggaagcgctgttgcgtgccacgttcgccatctgattgcctttatttttcggatcttccgtcacccgcgcatcggtgtaggcgtaggtagcaacggcgctgacgctatcggtcaattgccccgccacgtccagctctacgccctgcgagcgaacgcgacctgcggttcgggtcacagtttcagtgccgataagctcattcaccatgacattacgtttggcaatatcaaacagtgccagagttccggtcactccgttgaccatttcgaccttgctacccacttcccaggattgtccttgctccggcggcaattcaccgatctgggtcgcaatggatgagttgggtttgaaggattcgctgtaactaccgtacaaagacacttctggtgtcagcttgtacaccacgccagtgcgtggaatcaatttgctatccgaactctgtgtattgatgataaacggacgccctttgccagcaaaaacgtcaaagctgtcataacgcagcccggctaacaaaatccatttatcacccaattcaatagaatcctgcgcaaaccagccataacttttaagattttcacgctgatcgctgtctttagcactcacctgcgtagaaggctgcatcaagccgtaaatcggatcgtaaatattaaaatcggagtttttcttaccgcgaatcatatcgctgcgataggtacggttatcttcataatcaaacccgaccaatacttgatgactcacgcttccccaaatcaaatctccgttcaaagttgcctgcaccgcttgtgcacggcttactgcgctggcggtggcgtcagcctgacgggttagtacgccggtattttcattcagagacagtgcccgagcctgattatcgctatagcgattgcggttataagcataggtcagggagcctttccagctatcattcaacacctgatctatctgtagcgtaatattgtcctgatcgccgcgcgtagcgttaaaaggctcgtcgaaacggcgtttacgtggcgtatcgaccggtttgcctgtgcgtgagtcaataattgtgccgcgatcgaaaggcgtgaggtattccatatgttcgtaggccaaacgcacggttgtcgtttcgccataccacatcagtgacggggcgataaccgtttgacgattacggccaaagttacgccaataatcggtttcatcgtgatcgacaatcatacggtaagcaaaaccggattgccccagcgggccggtcacatctaactgaccgccaccaccgttaaaactgctgccccaaccttctacatgagtacgctgcgccagctgcggtttcttggtgataacgttgatgacgccacccggctctcccatgccatacaacattgaggcgggccctttcaacacatctacccgctcggtagtcggagtgaaattacgagcctgcgccgaccgtacgccatcccgtaaaatcgatccgtcgcggttatcgccaaagccgcgtttcatcagcgcatcctgcgtaccgcccaacgtattggactgagtgataccactgacgttatataacgcttcatcaatatttctcaccgcctgatcgcgcaatacctgcggagcgaccacattgacagcctgcggaacattcaacaagttggttgaggttcgcgttccggtcgttgatgtggtgggctgatagctgtcggaatcttcttcgctaagctggccaatcaccaccattttggttttttcactgtgcggcgcagtttcagcttgagcggctggcatcgccaccagcaaaggcagaccgagccaaggcaagcgacgaatatcactgattttcattgttgaggttactccaataagtccctgaaaaagttaacggcaaaaattgttcatataattgttggaatgttttttgtgggtcgatatcggcaaaaagatcggggtaaaacgctttggcaaacatctccaccgccacaacgtggtaagggctgagataaaagttgtgccacatgctgtaggcacggtgctgctgaacggcattcaagtgagaaatgatgggctgcccggccattaattgctgaaaactgtgttgagcctgactggcgctcaccatcggccctaattgcaggctggaaagacgcttacccgttgggccagccataccggttgcaatataaacgtctgggttggccatcagaatggtttcaggattcagctcgccatagacagttttaattcgcgagcgagcaatattgtccccaccagcgaaatcaattaaatcgcccaagctaccgcgggaagcggtggtacagcagctttctctacgccccagatgcaactgaagcatcaccgtgggcttcggcccctgatgttgtgccagccgttgttggataacctgcatatgttgctgataaaaagtgatgaactgctcggctctagcctgacggttcagtaactcccccaataatcggatgctgggaaccgtgttattcagcatatcgacgcgtaaatcgacgtacaccaccggaataccggctttcgataatccgctaagcatgacttcttcatcggcatcatttttggcatagcgcggcaacaccaccacgtcgggatgaagctctatgattttctcgacatttatctgacggatattcccctgcgcgataattgggactttttcaatatcagggaatttctcaacgtactgctgccaactttgagcatcgtaataggctaaatcccccggccagccgataattcgctgagccggattgccctcttcaagtaacgctaaggtatagagcattcggctctcgcctaagatgatgcgctggggattctcaggtactacaacctgacgccccataatatccttgagtttttttgcctgagcgttaaatgacattaataacaggcaggttattaatattcttgaaattattcccatgatgtttcactaaaaacaaacaatcgcgcatgataatagttctcacttgcattttcaaattatttgaaattaataaaacgcaaaaagaggaatgcacggtgaagcattcctctaaactattttatatttctgtttgaccatttatctgtattccatactgcaccacctttgattaacaaggttcgcgcggctggcagatataaaccaaggcgggagggaaatttcggactacgcgcattttcttccaggtaaaatagcgagataacaaaggctcggacaaatgactatattgaaacagtatcaatgagccattgcgttgccgtaatctttgttgagtttgctgcaatattttcatgctgattttggttggaatagacagtaaaggcaggcaacagaaaatggcgtcgtaatgtaaatccaacagctctgccgaacgcgccgcaacctgtaaacgcggatcgtcaattttatttaattcatcaataaagtgagattgaatttcataggcctgtagcctggcatccttttccattcgcgataaaatccgacgggtcaaaacaccatccgcagcccctaattccgcgattgtcatcgccggcatccactcaacctgatttagcatggtttggcacagccaaggagatgaaggcgccaaagtgccaacagtacgcggagaggcaataaaccgctgaatatatgagaactgacttttaaaattacgtcgcacggtgtttaacatagcctgtcccattaagtccggatagaccaccataacaccttaaaaacctgaatatctctttaagattgttctaagagtcaggtatttttttcgtaaaaaaaatagcctattaccgtcatacaaagcgcttccctcctggttaaaatattattcggctaatcttagataataaaaattggcaaataaaaagagccccaattggaagctacagcctgctagagctataactttcaatcagaacccttacgccctcagcgaaatttgagggatattttaagcgctaggaatttattgattagcgataaatttcagcactggccgtatagtaacttgaatcacctggggaactgatgccaatgacacgatagtggctggcgccgtcagcaacggccttggcattcaatgcggcctcaacatcgcttggtgagccgctgatgccggatacggaaactacgcccattgcctgcaattggctcgcctgttcgcgattaacttcttgggctgccaggcttgaaaaagaagcgctggcgataaacgctgcggtaataaaggttaatagtttcattttagctccaactttctgattattctcagtgttcagtgagattaattatgcgaagaataacgaaagcggacgtaatgctgagtaaataaactcaatcattgtggggaaactaaggaggaattgagttaagttatttcgccaaaggaatggctaataacggtagctatatagccaactttgccctctaataaaacaacctttggggttggcttaaatcaaagggtaaacagcgtcagcgaatgattgtatacatgcacagaaatgcaattggcgattttgctgccattaccgaacgtcatgaatagagggaaaaatggtaatattaagagagttggcttcagaagaactggatgcctaccgacatttctttattggggagtacgctgaagatctgagcgctaattgcggctacagtcaggataaagcacgacatcaagctcacttatccttcgttcaatcgctaccagacggtattaatacgataggaaataaaatttaccgcattgaaaataactataggctagtgggttatctttggtacggattaaatgacggcggcgcttcggtttatattaaggatttttgcatattgcctgaatttcagcggcaaggatttggaaaagccagcctgcaagctttagaagcagaactcgtcactcagggaatttttgaaattaagctacgggtagcggcagataacccacgagccaaaaaactgtatgaacaattagaattcaccgttaccggattcaatatggttaaaacactaaacaaaccatagcttgttgttcaccctggcaacggctcatcataaaataattgctcttcactgcgaggcaaagacgccagtagctttgaagctatttttagcaatacctatcatactgactcgatacagtctgaacgctgggagtggttaagccaggactgatttcatgcaggcaggattaactgcatgaaatatgatggtcgttattcaccatccaaatgctgtaattgatttcgataagattttactttttggcgcttcttaaaccagatggtaaatgacaccacaaaaataccgccagccagcgtcaaaacgcccatttcttgctgataaaacagcatgataataaaataaacggcagaaataattgcaatccacttcgccgtatgaccaacagagtttttttcattagtcagacggcggatatgctcttcctcgctaattcccatcatttattccctctgtgagtgaacttataatattgggccagacgtatgataatacaacataattttctgttttaattttcatcgctcaggaagaatctgattgacctttttcaatcaaaagagtttacgagaatgcgccttcagttatcgccgctagattccatcctgaaattttctggacttgaagctttgctgcttttccagctcaaagatagctcgctgcaaccccttttcctgcattggagacagtttgggaaatttaaaactcaggcgcgtcattgtgacggtttcgcctttgttactaatcacttttttatctactgcacgtatgaattgcaggtccagatcaaaagagccaaactcaccgagatccaataaagagccgcgaagaatctcacacccttccaacggcaactcactgtctttattggaaaacatgcctacaccgcccaaagagatatccgtgagtgtgtgcttaaaagcggtgccattaggaaacttgccagtacaataaaaaggtggccattgtgggatgttgattcgaaaatattcgcgccgttgaataaagtacaaagaatcgggaattgggctgctaaacgcgggtagaccgaaataggtgatctctgtttgtgtggtgcaggagaattcaattttggcaccagcaggttcggcaataaaagttagctgttcggaatcctgtgctaacagattttcacgttcaacgctgccaaaatcaaaaatgaattgattagcatctggatgaacttccaaaatgcggctgataaattgcccacgggagtgcgtcaccattatagcggtattattttttttcagatcccgcaaaattgcgcaaatagctaatcgattctttttaacatactgttctttcgatatctcactcacctgccgatccccaccaagaatttttgattgaattaccctagagaacaccgcaaagagtataaccgtcaatcaaattatcggcagaagttaggaaacatttattgactcttatccgatatggcacaaatttctgcaattggctgcaaatgaaaacgggcacctgaataagtgcccgcttgatactatttcaatccgctagctacgaattaaatcatcgccgtaacctatccacttataggtggtcagagcttctaaccccataggccctcgggcatgcagtttctgcgtactgacggcaacctcagcccccagaccaaactgcccgccgtcggtgaaacgagtgctggcattaacgtaaacggctgaggaatccacttcccggacaaaatgctctgcactgctgagcaaacgggtaagaatagcgtctgaatggcgggttccgtgctggcgaatatgctcaatcgcggcgtcaatatccgccaccacgtgtacattcagatccagagcgagccactcatcgtcataattcgcctcttctaccggaacgaccttcgcaggcccggccagcaaatacggcatcgcttgctcgctggcatgcaaagtgacacccgcactttccattttgctgcttaacgcggctaaaaaggcggcggcgatatcccgatgaaccaacagagtttccagtgagttacaggcgctaggacgttgcgccttcgcattttcaatcaccgtcaatgctttggcaaaatcaacgtcggcatccacaaaggtatggcagaccccaatacctccggtgatcaccggaatagtagattgctcacgacacaatttatgcaggccagcgccgcctcgcggaatcaacatatcgacgtagcgatccaaacgcagtaaagcattcaccagtgcgcgatccgggctttcaatcgcctgtaccgccgccgccggtaaaccgctttgttccagcgctcgctgaatcactttaaccatcgcctgattggtatgatgcgtttccttaccgccgcgcaggatcaccgcattaccggttttcagacacaggctggcaacgtcgatagtgacgttgggacgagcttcataaatcacgccaattacgcctaatggcacccggcgacgctctagcttcaggccgctatccagcaaccggccatccataatctgccctaccggatcgcttagacggcaaacatcgcgcacatcgttagcgatcgcagctaaacgcgcaggcgtaagtagcaaacgatcgagcaaagcttcgctcattccgctggcgcgcgctgcagccatatcttgctcatttgcctgaaggatttcgtcgctttccgtctccagcaacgccgccattgccatcagggctttatttttttgcgcagtactcaatacgcccaattgccaagaggcctgtttagccgcttttcccatctcttccagcatgctagctccttagctgataatcataaactgatgatcatatcgtcacggtgaacagcgaccgggccgtattcatacccgagtatttcactgatttgctgagaatgatgtcccgccaacatacgcaatgcatcgctgttataacgtgagacaccgtgagccagatcgcggccgctcaggttacgaatacggatcacttccccgcgggagaaatcccctttcacgctacggatacctttcggcaatagcgagctgccccgcgccataatggcggctaccgcgccatcgtccacggtaatttcaccggctggcggcgcaccaaagatccagcgtttacggttttccagcggcgtttctaatgcatggaaacgcgtgcccaccggcgtgccgtcaatcacatctcggataacatcaggttgagcacccgcggcaataatcacgtcgatacccgctcggcacgcgacgtctgcggcctgtagcttggtcgccatcccgccggttcccaaacctgaaacgctatcaccggcgatttcacgcagcgcgtcatcaatgccatgaacgtcccgaatcaactctgcggcagggttattgcgcggatcggcggtatataacccagcctgatcggtcagcagcaataatttatccgcaccggccagaatagccgccagcgccgagagattgtcgttatcgcccactttgatttcagccgtagcgacggcgtcgttttcattaataaccggaacaatgcggttatccagcaaagcattcatggtatcgcgggcgtttaagaaccgttcgcggtcttccagatcggcgcgagtaagcaacatctgcccgacgtggatgccataaatagagaacaactgctcccatagctgaatcagacggctctggccgaccgcagccagcaattgcttcgatgcaatggtcgctggcaattcaggataacccaggtgctcacgcccggcggcaatcgcgccggaggtaacgataacaatgcgatgaccttttgcgtgttgctgggcgcactggcgcaccaattcaacaatatgggcacggttaagacggcgagagccgccggtcagcacgctggtgcccaatttcacaaccaaagtctggctgccactcataatttttctgccattgggatcaataaaaaggaatgatacagcagactttgtagcaggagacaggcgttatgccaacaggcataacgcgaaatcaccgctttattgagcagaaaggggtttatgcagagagtttgatgggctgttcgccgaaatcctttgccggttctagcgtcagatccatcgtcttcagcatttcatggaggcgtttatggaaaccacggagcgtagtttccaatttttcctgaacctcaggatctttgattttttgttctttccaacttccctcggtattaaacaagccgagttggtatacataagtaaaacagctgtctttcgactccagctctatccaccacccccagaactcacgtttttcgggagcaagtttcacattgacgcacacggctagacaatcaaagaaaaagcggtcgttctggcactgcccttcacgtagatatggccctaaagctgcaaaacgtttcatcagtttgcttttcgggtgagcgctggatatcgtcatgcttcaatctccttaagtagacgcacacctttttagcaaactgttaaattttagcaactaattaacgcattttatcttttagccaatcgcaagtttgcaacagagctctatgaaaactgtcatacagcggcgttgaagggatgcttaacagcttgccgtcaacggaagaggacacgatcagtttcgcatcttctttcggactaaaaggatcgttttcccaatatccggccagcattggcgtatggcaacgccgtcccaacaacccttgggttttgagagaaaaacggttcagctcagtttttaacgtatcatccgatgcatccgccatacctaaccggctggccagcacatccatatacatatccggcacccgactctggctgttactgtcgcaaagcaggtgatggacgatagggcctacgcaggccacgccgcgtaaacgctgcggctccaaatagcccaaacgcactgcgacgttggcaccgaaacggaaaccaaatagcgaaacacgctgatgatcgacccagggaatcgtcggcaaagcctgtagcacctgctgatgcagatagctggtgtcctgcgttaatttccagcgcgaagatgagccgacggaaggcatgtcgatagtcaacatcgcgatacccgccggtgcaagataatcgcggaagagacggtggtaatcgctctgcaacatatccaggccaccacacatcagcaccgttgggaaaggcgcactgccaattgtcggcatatgcagaaagccggtcagcgttccgccatcctgaatggggaaactcagctcttttaaagtgaaaggcagatattttgccgcttcttcataggctcgattagacaaaatttccgcctgctcggccaattcatcaccacgcaaatgaggataaccggcgatgctgtacatgttggctgcattcagccaatactgcccggcggccagaggatcggtttcttccatggctttttgctgccacatcatgccctggtgagaccactcgtaaatccagttgccgttgcggtaacccaccacggtatccagtaattcattatcactgtgttctgcattagacatcgcaatccgcgccagcacctcttcgatttccagaggatccactccgcgccaggtccacatcaagcgattgatcatacgataccaatgacaggtagtatcgccgtccaatgcggagtgaatattcatggtttggttgcaatgagcatgcctgaccaaagtcgaggtctcaggatgcttgaacttgggtttaaacaggatttcagaaaggttggcttgtgccatggttacaatagcctccataagccgcgatcccgccttggtttaggctggggaatatggggttagtgtactcataccgaggaagaaatgaaacgtccgacagcgtcggacgtttaaagctgcgtaaattatttgccgcctagcggttccacgaaggtcacagccatatcccacggctgctcaatccatgtatcctgaggaatatcaaccacatagtcatcaaccaaaggacgacctgccggtttagcgaaaatagtcacaaagtgcgctttcggatacatttcgcgaatggctttcgcagtaccgccggtatcgaccagatcgtcaatcacaatgaagccttcgccatcgccttcggcacgtttgagcacggtcagctcacgctggttattgtggtcgtagctggagatgcacacagtatcaacatgacgaatacccaattcgcgcgccagaattgcaccgggaaccagtccaccgcggctaaccgcgatgatgcctttccactgttccgcaggaagtaaacgctgtgccagcttgcgggcttgtatttgcaacatatcccaagttacgacgtatttttcgctcataaaatgtagtcccagccgtattaaagtggcttgtcatgtatcgaaggggaaaaaaggttgcgcgagattatagtgaggcaacaagataaaaaccagcaattatcccggtaattccgcgaatcgaatgcggtatttgtgcggccaaacgcgcgcaacgcaaatgaaagtgatattctcgataaatcgcgccatagcaatggcggttagtccttaaccctaaaacctacagtatctcagacgcctccgcattaatctggtgtctgtatgagcatgctgttaaaggagacttacagtgtctgaactgtctaaactttcgcctcagccgttgtgggatattttcgctaaaatttgttctatccctcacccttcttatcacgaagaagaattggcgcaatacattgttgcctgggcaaaagaaaaaggtttacacgccgaacgcgatcaagtgggtaatatcctgctgcgcaaaccggcgaccaaaggcatggaaaaccgtaaacctgtggcgctgcaagcccacttggatatggttccgcaaaagaacaatgacactgttcacgatttcactaaagacccgattcagccttatatcgacggcgaatgggtgaaagctcgcggcaccacgctgggcgcagataatggcattggtatggcttccgcgctggcggtactgtctgacgacagcgtagaacacggcccactggaagttctgctgaccatgaccgaagaagccggtatggacggtgcttttggcctgcaaccaaactggctgaacgctgacattctgattaataccgattccgagcaggaaggcgaaatctacatgggttgcgccggcggcattgatttcatcaccactttaccgttacagcgtgaggcggttcccgcaggctatcaaacgctgaaactgatcgtcaaaggtctaaaaggcggtcattccggcgcagatattcatttaggtttgggaaatgccaacaagctgctggctcgtttcctatttgaacatgaagcggagctcggcctacgggttctggatctgaacggtggtacgctacgcaacgcgattccgcgcgaaggtttcgctattttggcggttgcagccgataaagtagatcatttgaaaaccctgactcaggactatttagacatcctgaaaaacgagctatctgcggtagaaaaaaatctcaccgtggtgctggaacccgtcagtagcgcagcgaaagctttgaccgctgatacccagcaccgtctgctggcattgctgaatgcgacgccaaacggcgtaatccgtatgagtgatgaagtgaaaggcgtggttgaaacctcactgaacgtgggcgtcgtgaccatggaagaagataaggccgaaattatgtgcctgattcgttccctgatcgacagcggcaaagactatgttgttagcatgctaaccgccgttggccaactggctggcgcgcagactacgcctaaaggcggctatcctggctggcagcctgacgcaaactctccggtcatgcatttagttcgcgaaacctatgagaaactgtttaacaaaacgccaaatatcatggtaatccacgccggtctggaatgtggtttgttcaaaaaaccttacccagaaatggatatggtttccatcggcccaaccatgacaggcccacattctccggatgaacaagtacatatcgaaagcgttggtcaatactggcaattactgaccgcattgctgaaagccattccaaaacgcgcttaagcgagtaccgcactatcattacgaacggcgccgcctgcggtagcgccgttttttatggcaaatttgctgctagaaaacccagaacctggcatctatcccagcgctattcccaattcagcaataattgccgttcaatctgcggatccagcaggctgacatgcaatcccaccagtcgcacacctctgtccgcccgtcgctcatcccaaacttgcttggcaatacgcaataaatcgaccttgttcaattctggccaaacgtgttcctgagtcgtttgctgaaaatcctgaaatttaagctttacgccctgacgagcaatttgcagatccggcctgaccttagccaagcgggcttccagttcggggaaaagtttttcaataatctcaacgcattcttcccagtgatgaatatcctgcgccagcgtcctttctacgccaacggatttacgcaaccgatcgggagatatacttcgctcatcaataccatggcagcgctcccataatacccgcccaaatttaccaaaggttttcagtaaatcagccaaaggataattttggacatcaacacaatgagttaaacccaattcctgtaaacgcttagccgttacttttcccacgcccggaattttgttaagcggcaaagtttgtagaaaaggttgaatttgatccggtgtaataacgtattgtccgttgggcttattgatatctgaagcgatcttggctaagaatttgatcggggcgattccggcggatgcagttaaacctaattcctcatgaattgactggcggatctgttgagcaattaaggttgctgaaccgctaaaaacctgactttcggagacatccagatacgcttcatccagcgataatggctcgataagcaaagtgtaacgggcaaatatttcgcgaatatgtaaagaagcttctttatatgccgccatacgccccggaatcacttttaaatgcgggcaaagcttcaatgccatcgcagtggacatcgcactatggacaccgtaacgtctggcaggataattggccgtgctgataacgccacgacgatctgcgctaccgccaatggccaaagggatatcgcgtaaactggggtcatcccgcatctctacggctgcaaaaaagcagtccatatcaacatggataatcttgcgcactctcactcccatcggcaatagacaactgtataagtatacagtaaaaaaagccatgttcaagattgtcctaatttaaatgccgctaaatatttctaatttccagatcgaatactgttatttacatttaagcgattttttcatttatttttaataaaaaagtactacattcgataaagtcgtagagtaatgtttttttataaagtaaaacacatgtatagagaaattcaatttaaatgggttatacggggtatatattatgcggaattatattatggcaagtatattaatcttattttcattacaagttatgtcatctccttcagctaatgaaccgccgaaaatagtggcgcaccgggctggtaccggagacgcaccagaaaatacgctccctgcaattaagaaatcgttggaaaatggagctgatgctatttggattaccctacagttaacaaaagatgatgtaccggtactttatcgaccttccgatttaaaagaactaaccaatgtttcaggaaaagtcagagactatacgaacaaacagctatcaacagttaatgctgctaaattctataatgaaaaaaataaaaccgcattttcagccaatattccaacgttagaagaagtcctaaagttgaaatatgtgctggaagattatcctaacgtcatgttctatctagatattaaatccccagatgccgaaaatctggctcagccttttgctcaggctctacaaaaagtgctgaaggaaaccaacagttttgaacgtacccgggtttattcaaccgacaaactgtatctgaacgctatagatcagatgaataaggacgcggggcgaaaagagcaaattcaacgttttgaaagtcgagatgaaactcgtgatgctttggtcgatataaccttaggccatcaatgtaagctgccggtagacaaaaaggagcgctggtacggattggagatgaagcgaaacgttgagttagtcgttgtggaaaaattcactcttggcgaaggccgttctcactcaaacaccgtattaacatgggataaaagcgctatcgattgtttccgctccaaagggaaagcctatattattttctttggtatcaatacagcgcaggattatgaaaaagcaaaagagctaggtgcagatgccgtgatggttaactcaccgaaagaatttaaaaaaatagtgaatgaaaaaaagtaatcgattaaatatatccttgtagacaaaaagcccggcagttaattagccgggccttttatgctataggatacgaaactgatccagtttcttctgccgggccgcttctttttccattcgctttttacgggaatcacaaggctcaggacagtcgcagactttctccatccccagcgtagcaataccgccgcagctcccctgtaaggttttgcgcttcactacatagccaatagacattccgccaataaccagcaggaagaagacgaaagacgcgagaaaaactgtcagcataactcctcctaagatcgattttgcagatagggttcgaaggcttccgaatagcgttcttcaaatcccttatctgttttaacgatcataaataccggtataccaagtagattagccagcgccagccctttttccggccccaacacatccagcccggtagacaaaccatcagcggtcatacagctaggattcagcacggtaatggaaaccaatctatggttgattggccgccccgtcgcgggatcaatggtatgagaatagcgtacgccattttcttcaaaatagttacgataatcaccagaggttgcgagcgacattctccctggttcaataatctcctgcgcactttgatcgacaccagcacccggtttttcgatcgctatacgccagggcttattttcgccattattcccacgggtgcgaacttctccgccaatatcaaccatgaaatttttgatgttctgagattgcagatattccgcaaccacatcaacaccgtagcctttggcgatggaagaaagatcgacgtacagctcaggcactcgcttaattagtgcgttgccttcaacggcgagtttatctattcccacccagccacgacgtttctctaattcttcggcagaaggcactttatcaggacgtccttcagggccaaaaccccataagttaaccaaaggcccgacggtgacgtccagcgcaccgtcggttaaccggttgatacgaatcgcttcctgcaccactttggccgtagcagcggacaccgggaaaggtttattaatttcccgactctgattaaaacggcttaattcagaatctggccggtaagtcgacatctggttattaaccacttccaaaatcctatcgacttctttttgcagttgttccggagaagaccgggacgtatcactcacatattttatcgagtaataggtgcccatggttttaccggtgagattcacctgctcagggccgcagcccgctagcaacagcactcccatcaggagtgccagccaaagtattattttcctatgcacaataatcctattattgtaaaacgcccgtcaggcatgacatcagccaccgaagtcatcaagcataatattgtcgtcctcaacgccaagatccttcagcattttgatcactgctgcgttcatcattggcggaccacacatatagaactcacagtcttccggcgcaggatggtttttcaaataattttccagcaacacattgtgaatgaacccagtgtatcccgtccaattgtcttcaggctgaggatcggacaaagcaacgtgccaggtaaagttttcattctcttcctgtagctggttgaaatcctcttcatagaacatttcgcgtttagatcgagcaccgtaccaaaagctgattttacgcttagaatgcaaacgcttaagctgatcgaaaatatgcgagcgcatcggtgccataccggcaccaccgccaataaacaccatttccgcatcggtatctttcgcaaagaattcaccgaatggcccggaaataaccactttatcacccggcttcaacgaccagatatacgaagacatgatgcccggaggcgcgtccggcatattcggcggcggcgttgcaatacgcacgttcagcataataatgccatgctcttccggatagttcgccatggaataggcgcgcaccgttggctcggtcactacggattcaaaacggaacagattaaacttatcccaatcgccgcgatattcttccggcacgtcaaaatcagcatatttgacggtatgaggttcagcttcaatctgaataaagccacccgcgcggaagggaactacgtccccatcaggaattttaagtttcaactctttaatgaacgtcgctttgttgtcatttgaaatgacttcgcaagtccattttttcacgccgaatatttcttccggcaaatcgattttcaagttttgcttcacgctaacctgacaggccagacggcaaccttctttagcttcacgcttagagatatgagaaagctcggtcggtaaaatatcgccgccgccttctttgatcgtcacccgacactgcccgcacgaaccaccgccaccacatgcggaggagacaaaaatgccgtggccagaaagcacattcagcaatttatcaccggccggtgcagtaaagcttttttccatatcaccgttgatttcaacctgaatatcaccggtattcaccaacttcgatttggcgacaagaatcatcaccgtcaacgctagcacgatgagggtgaacataactacgcctagaattatttccatgagttcttcctgcctttatagatgcacaccggagaaggacataaagcccagtgccatcagcccggtggtgacaaaggtaattcccagccccttcaaaccacccggaacatcggcgtatttcattttttcccgaatacctgccagcgccacaatagccagcatccagccgattcccgaaccaataccgtacacaatggattctgggaagttgtaatcacgctgcgccataaaggacacgccaccaaagatggcgcagttcacggtgatcaacggcaagaagatgcccaatgcgttataaagcgccgggaagtagcgatcgagaatcatctccaacacctgcacaatcgccgcaatcacgccgataaaagtgatgaagttaaggaagctcagatcaactccttccaccagcgctccatcgcgcagcaccaggttataaaccaggttgttggcgggaaccgcaatacccagcactacggttacggcaatgcctagaccgaaggcggtggacactttcttagaaaccgccaggaaagtacacatcccgaggaagaaggctaacgccatgttctctacaaacaccgcgcggacaaacagactgatgtaatgttccaccgtcaattactccttttcaatctgcgcaggtttcagggtacgtaagccccaaatcagcatgccaatgataaagaacgcactaggcgctaacaggaacaatccgttcggctgataccagccgccgttttgtaccgtttccagcacggtgacgccaaacagtttgccagaaccaatcagctcacgaacaaagcccaccagcaccagaatcacgccgtagcccaagccgttaccgataccatccataaagctttcgatcggcggtgacttcatggcgtaggcttccgcgcgccccatgacgatacagttggtaataatcaaaccaacgaataccgaaagctgcttcgaaatctcataggcgtaggcacgcaaaatctgatccaccacaatcaccagagaagcgatgatcaccatctgcacgatgatacgcacgctgttagggatatggttacggatcagcgagataaagaagctggaaaatgccgttaccaaggttaccgccagcgtcattaccagtgcggtttccagtttggtggttaccgccagcgccgagcagaccccgaggatttgtaatgcaatcgggttgttgtcaaacaacgggccgaataaaacccgcttaatctctttgctatcagccattttttaacgctccttcgcgcacttttttcaggaacgggccaaagccgttttcacccaaccaaaaatcaaaggtattctgtaccccgttggaggtcagcgttgcaccggacaaaccgtccacggcgtaaggatcgttcgcatctgcgcgtcctttcactacgcgaatagccggttccccttgttcattgaacaaacgcttaccgacccattggctacgccagattgggttttcaacttcaccacccagccctggggtttcaccctgatcgtaatagctgatgccacgtacggttttcccgtcgttatctaccgcgacgaaggcgtacatcatcgaccataaaccggagccgtagaccggcagcacaattttactggtctggccctcctcattacgcaccagatagatttccaccagattagcccgacgtttaattccggctttatcttgcgcagcggtcagagcgatgctttggctatcatcacgtaaagcctgagaacgatcgaagctggtcggatcggttttaacgaaatcaccgctttgcaaatccaacagacgcggttcaatacgagcggaaaactcttgtttgacctgctctgcatccatttttggctggagtaaaccggccacgtccagaatgttgcgttgcttatccagtaagcgctgttcctgctgtttggatttcaagccaaccgctgcgccggagaccactacggagcacaccagacacagcaagaccactaccatcagcgttttgccgatagtatcgttatttcttggtttatcactcgccacgggctttcctccgcttgatgttggcctgaacaaccacatagtcgaacagtggcgcaaacaggttggcgaacagaatcgccagcatcattccctccggataagccggattcacgacacggattaagacgcacatcacaccgatcagaccgccgtaccaccacttacctttattggtaaaggaagccgataccggatcggtagccataaagatcataccgaaagcaaagccacccaataccagatgccagtaccaaggcatagcaaacagcgggttagtggtagaaccaatccagttgaacaggaaggccgtcgcaatcatgccgatcatcacaccagcaacaatgcgccaagatgccacgcggccaaacataatgatggcaccaccgatcagaatcatcagggtagaaacttcaccaatagagcctggaatgttgcccataaaagcatccatccagctgattggttggccggtgaccatgttcatcagactgtggctgccgttaacgctccactgggacaacggcgttgcgccagagaatccgtcggccgcgttccagaccagatcgccggagatctgtgccggataagcgaagaacaggaaagctcgcccagccagcgccgggttcaggaagttacgtccagtgccgccaaagatttccttaccaatcactacgccaaatgaaatccccagtgccgcctgccagagtggcaaagttggcggaacgatcagggaaaacagaatggaagtaacgaagaaaccttcgttgatttcatgacggcgaataatggcgaacagaacttcccagaagcccccaaccaaaaacaccaccgcataaatcggcacaaaatagaccgcgcccagcgtcatcatgctgatccaactggcatccggtgccagcgaggcgccaagcatctccgccagtcgataatgccagtcggcggcaatcacctgttgcagctccgcgccgctatacaggtggttcagcgcaggaatagcctgctgaccaacgttgtacatcccccagaacatcgctgggaataccgccagccataccaaaatcatcatccgtttcaggtcgatagcgtcacgcacgtgggaggcacccggcgtcactttaccctgagtgtagaaaatactggccgtggcttcgtatagcggataatacttttccagctttccgccggactcaaaatgatgctctattttctcaaaaaaacttttcaggcccatgagttatccttcctgctcaatcttggtcaaaatgtcgcgcagtaccggaccgtattcatatttaccggggcagacaaaagtacagagcgccaaatcttcttcatccagctccaaagcccccagcgcctgagcgctgtcggtatcgccggctaacagatcgcgcagcaaatgcgtcgccagaatatccagcggcatcactcgctcgtagttgccaattggcaccatagaacgttcgccaccgttcaatccagtagaaaaagcaaagcgcttgcgcttgaagaaatggccgagggtggtgcgggtaatagagaatttatctttacccggcataatccagccgaacagctccttgtctcgcccttccagcactacggaaacctgctgatggaaacgaccaagatagccatgtgtcgcagaggccgcggttccgctcagtaccgaaccggagataatacggttatcccctgctttcagtttaccggcggtcagttcggtcaggctggcgcctaaacgcgtgcgcagcaggccaggttcttttacctgcggccccgccagcgcaataactctatcagtgtaaagctcaccttcgacaaacagtttgccaatggcgatcacatcctgataaccaatgtgccagacggttttcgtcatactgaccggttcgaggaagtgaatgtgggtgcccaccaacccagcaggatggggaccggaaaattcgttataggttatttgcccgttattctggccgcgaatgatttccccggcgccgtgacaaacgtgcactttaccttcggttaagcgcgtcaatacgctcaaaccgtggttaaaggcatcaatttgcgtggcaataatggcctgaggatcggcagccagcggttgggtatccatcgccgtgacaaaaatagcgcgtggctttgtgcccggctgcggagttttactgaatggacgagtgcgtagcgcagtccacagacctgaggccagcaaattttgctgaacctgctccgcgctcagctggttgagctcggcggcgtcgtaacgattgaaggaaacgctgtcgtctccctctatttcaatcacgacagattgcagcacacgccgttcaccgcgattaatcgcagaaatcttgcctgctgctggagaggtgaaaaacacgccggggttctttttatcttcaaaaagcgcctggccttttttgaccctctccccttcttgcaccaacattgaaggacgcatgcccacatactcttcaccgagcagtgcaacatgatgaataaccggaccttcctgtatgacctgagccggagccccggcaataggtaggtcgagtcctttttttattttaatcataaggtttgcacgattctgtcaggtgtatcaaatgctgtacgtcatccagaggagcacagcaacgcgatgattagttatttttaacagttcagttaatataatgaggtattaaccggcagcgcaattagcgtgcattttacttgcaggcatttactgatttaaataacaacattaatttctgctaatgtgacagcgttggaagatacaaaaattgcgtttcattgctcaacaaaacaactcaatatctttaacaccaatatgccttcagtagccgaggattttagcattttagcctgttgctgtctgataaaagcagtgacctggctcaagcaaacgacattatattgatcaagaatcgcctctgcactcggtaaaaacgtaaggttaattcgcttttaccgatcacagtttcttttttatacaaatctattattgataaaaatattctgactgataatctgcaaacctatactaacaaaagcagtggctcaccgatcggcagatacgatcggttcccagtaagagaagtaggaataattaatgggcaaaatcgctctgttacttgcgatgatcatttgtttgcctgcggtatccttaaccagctcagccagtgagcccgttgcggttaccaatgcgcttaaacagcaattactcggttctccggtctatatccaaatatttaaagaagagcgaacgttggaattatatgcccgtttacagggcgaatatcgattggtacgaagttatcagatttgtaatttctctggcggtcttggccccaaacgccgcgagggagattttaaaagcccggagggattttacagcatagatacgcgtcatttaaaacccgatagtaagttttatcgggcgatcaatatcggcttcccaaatgactttgataagtctcagggatactcggggaaatatctgatgatccacggtgattgtaaatccattggctgttacgccatgaccgacaattacatggatgagatatttaactacgtgcaaaccgcatttatgaatggccagagcaaagtggatattagtatttatccgttccgtatgaccgagcaaaatatgcagcgccatcgtaactcgtcagatattaacttctggcgtcaattacaaccaggttatgcctactttgcaaaaaatcgtatgccgcctttggtcggtgtcattaacggacaatatgtgattaatcgtccgttaatgtccagtgcgccagcctcagagtacgcgctcaccaaaacagaatagagcaaactcgcctggcgctattttgtgccaggtttcattgccggtcagcggctgagtggcaatgacgctgaccacatcattgggtgtggtttgctgctgaaaatctatctccacatcctgatccagcaaagtggctttaccgaaaggtgcccgacgcgtaatccaataaagattggttgagcaataggccatcacaaaacgcccatccgataacagcatattaaatacgcccttggcgcgcagttgctcagacaatgtcgcaataaagcgaaataccgcaggccagttacccggtgtgcgcggataccgcttggccaattgatttaacagccagcaaaacgcatattcgctgtcagtctggcctatggggcggaaagtgccggtctccaactgacgataccctttcaattgtccgttatgcgcataagtccaattgcgcccccacatttcccgagtaaaaggatgggtattttccaacgccacttcgccacggtttgcctgacgaatatgggaaatcaccgcgcaagacttgatcgggtaatcctggaccaggcgggctatcggggagttaaagctgggttgcgggtctttaaaggtacggcaaccgtgaccttcataaaacgttataccccaaccgtctttatgcggccctgtgccccctccgcgctgaaccagcccggtaaaactgaaacagatatcagtgggcacattcgcgctcatcccgagcaattcgcacatcaccaacctcctctactgcctgtgcagtagcaataaaaagccaaaaccaatcagggcgaagaaaccggaggtaaagcgtgcgataaggaggccatgatagcctccggtgcagagcggtgaacaccccgaggcgcgggaaactccacggcgacctcaggttattccataccagccagttattaggccttaaccatctctttttcaatcagctgaatcaagatatgaatcgctttgatatgtatttcctgaatacgatcggcgtaaccgaaatgaggcacccgaatttcgatatctgcagtacccgccattttaccgccgtctttgccagtcagggtgatcactttcatccctttggctcttgcagcttcgatcgccttaatgatgttgccagaatttcctgaagtggaaatgcccagtaaaacatcaccttcacggcctacggcttccacatagcgggagaaaacatagtcgtaaccaaaatcattactgacgcaagacatatggctgacatcagagatggcgatcgccggatagccagggcggttttcacgatagcggccagttaattcttcggcaaaatgcatagcatcgcaatgggagccgccgttaccgcaggaaagcactttcccaccggctttaaatgagtcagccagcaagatagctgcccgctgaatggcgtcgatattggcatcatcactcaggaaattagccaaagtatcagccgcttcattaagttcacttcgaattaaatcgtggtacatgggagcctctttatatgtcctgtggcatcaataatcttccgcaggcagtgtaccggatagcgcaaactgcgagaagcgccgtgatgaactgttgcaacggcttttgaccttaaatgctacgaatttgtgaaccaagttgtaattgatatgtaatggcattgataaaaacaatgagatgaactaaaaccaatacatcactcaacaggtcagacctcctacaactcaggagcttcattatgatggttcttagcattgttgccttgctggttcttattggtgtgttgttctatcaccgggtgaacctacaccttagtagtctgcttcttctggtatacaccgccgccttgggtgcgctgcaagtatggtcattctgggcgttgcttcctttggtgattgtgttgctgccactgaacttaacgccgctgcgccgctctctgttctcagctcctgcgctgcgtaccttcagtaaaatcatgccagccatgtcacgcaccgaaaaagaagcgatcgatgcgggaaccacctggtgggaaggtgatttattccaaggcaagccagactggaaaaaactacataactatccaaaaccacagctaaccgctgaagaacaagcctttattgatggtccagtggaagaagcctgtcgtttagcaaatgattttcagattacgcatgaactggctgatttgccgccggagctgtgggcctatctgaaagaacaccgcttcttcgccatgatcattaagaaagaatacggcgggctggaattctccgcttatgctcaagcgcgcgtattgcagaagttatccggtgtttccggcattctcgccattaccgtgggcgttcctaactccctcggccccggcgaactgctgcaacattacggcactaccgaacaaaaagatcattatctgccacgattggcgcgcggcgaggaaattccttgcttcgcactgaccagccccgaagcgggttccgacgccggtgcaattccggataccggcaccgtttgtatgggtgaatggcaaggtaagcaagtgttgggtatgcgcctgacctggaacaaacgctatatcacgctggcaccgatcgcgaccgtgctgggtttggcgtttaaactgtccgatccccagcatttactcggtgaaaccgtagatttgggtattacctgcgccctgatcccaactaacactcctggggtagaaatcggtcaccgtcacttcccgctgaacgtgccattccagaatggcccaactcgcggtaacgacatctttgtgccgatcgattacatcattggcgggccaaaaatggccggtcagggctggcgtatgctggttgaatgtctgtccgtcggacgtggtattaccctgccatccaatgcaaccggtagcctgaaaagtgtggcaatgggtattggcgcttacgcctacattcgccgtcagttcaaaatctctatcggtaagatggaagggatcgaagaacctttggcgcgaatcgctggcaacgcctacgtgatggacgccgccgccaccttaatcactagcggtattatgctgggtgaaaaaccggcggtactgtctgccatagtgaaatatcactgtacccacaggggtcagcgcgcagtcatggatgcgatggatattgccgggggtaaaggtatctgtctgggtgaatccaacttcgtcgcccgttcttatcaaggcgcgccgattggtatcaccgttgaaggtgccaacattctgacgcgtagcatgattatcttcggtcagggggctatccgttgccatccgtacgttctggcagaaatggccgcggcacaaagtaacgatgttaacgcttttgatagcgccctgtttggtcaccttggccacgtaggtagcaataaagttcgtagcttctggctgggtctgaccaacggccgtaccagtcatgctccggtaagcgacagcactcgccgctactatcagcagcttaaccgcttaagtgccaacctggcgctgatgtccgatgtttccatgggcgttctgggcggcagcctgaaacgtcgcgagcgtatctctgctcgtttaggagatattctgagccaaatgtatctggctaccgcaacgctgaaacgttatgaggatgaaggccgtcagaaagaagatttaccgctggttcactggggcgtgcaggatgcgctgtatcaggcagaacaagcactggatgacttactgcgaaacttcccgaatcgctttattgctggcgtgatgcgtattggaatcttcccgtttggctgcgtacatcgcgcgccgtcagatcgcttggatcaccaattggctcaattgctgcaagtgccttcggcaacccgttcacgtattgggcgcggtcagtacctgacgccgagtgaattcaacccggtcggcttgctggaagccgcactgcaagacgttatcgccgcagagccaatccacaaacgcctgagtaaagaagccggtaagaatctgccgttcacccgtttggatcagttagccaaacgcgcactggcggaagggaaaatcagcgcggaagaagctaacgtgctgattaaggcagaagccagccgcctgcgctcgattaacgtagatgaatttgaaccggaggcgctggctacccagtccccggtaaagcagccagatcggccacgtcaaacggaagcggcgtaactgatagtactcattgataattcatgtgtctaaaacaaagtcccggtctaatgccgggacttttttatcgctgatttttgatagcgaactagcgctgaacctgaaaatagcgagcagccaagcgctcaattatccgttttgacgaatacgggcaattaattcacccacattatcaatatgcaccgctgccagtattaatgtgcgccccagactcagagcctgacgctgacaggctaaacgcatcccgtcatcttcaatgctgtccaaatccgcgacgtgtgccaacccgatggtgcgcctaatcaattcggttccacagtaccccacggcatcattccacacctgccggaggaaatactcggcataaccagcagttttcaacgcttgatcctgagttttctctgcgcatagcgtcagaaaacgcgtggcaaaagcctgccaaatttcacgaatgtcatctaaacgctgttcacggcctgccgctgcgtctctcggcccggtcaaccccggcaaaccgcagtaatttagcaatacatttcctaaagccgtaccgatatcaaaaccaatcgggccataaaaaccgaattctgcgtcaatagctttcaatttaccttcggccacaaaaatcgagccactatggatatcaccgtgtagcaaagcttccgctttactcaaaaaccgatgtttaagggaagctaccgccagtttcagcccgttgtcctgacgcagcgccagcacctccggcagtaacgcggcgtcaaaattattgcgttcatgatcgtgataaggatcggtaaaaaacagatcttcagtgatctggcacagttcgggattggtataacggatcaccgccgccttcttactttgtgccgactgataaaaatctgaggtgtggaataaagtctgccccagatattcacccaactggctggccgcctgcggataatggcggcctttcaccaattcatgccgccagatgtgatgatcggaaagatcctcctgcaccatcaccgccaactccgcgtcatggtgcagtattttaaccgtgtgttcagggcagaactggctgtgagttagcagggtttccgcttcgatgcgcgctcgatccaaggtcaaaggccaagattctcctacgcaacgaacgtaaggcaatgcctgtttcaccaccacccggcttcgccccgtttcatcacggatcttaaacaccagattcagattgccgtcgccaatttcatccgccgaaaccaacgtgtgcggttcagcaatccggccatattgacgcgcatatgcaacggcatcagcagcagtaaacgtgtgataacctgacatctcccaccccttctcaattctctggtcgcccacggcgcattaattatttaggcgtaaaaacatgtagacgtctatacatctgtaaagcatgttggcagaataagaacccagatgcaataacgcaacatggatttaactgacgatgccgacgcttaacaccaccagcctgaaaatacgcgataaccagctttggattctcgatcagcaagccctgccccaacgccaaatctggcgtttggctgatgacgtagaatctttggtcgaacatattctgacgttacgcgtacgcggtgcgccgctgattggtctctctgccagtctgttactggcgctgctggcggagcgaggtttatctcaggcgcagttggagcaagcgctcatcacgctaagagaatcacggccaacggcagttaacctgatgaataatctggcacggatgcagcaagcgttactgcggccagattgggtaaattccatgatgaaagaggcgctacgtttgctggacgaggatcggattctgtgcgatagcattgccaatcacggcgcagcgttggttaaatccggtagcagacttcttacccactgtaataccggcggcttagccactgtgggcgtgggaacggcaataggcgtaatattacgcgctcatcagcagggaaaaatagataacgtttgggtcgatgaaacccggccattactacaaggtgggcgtttaaccgcgtgggagttgggcgagttgggtattccctatcggttaatttgtgattccatggctgcgaccttaatggctcagggccaggtagactccatttgggtcggcgcagatcgtattgccgctaacggcgacgtagcgaataaaatcggcacctacagcctggcggtactggcacattatcaccatattccgttttatgttgcggcacctcacaccaccgtggatccgcaatgtccaaacggagccgccattcctatcgaacagcgcgcaactagcgaagtcaccggcgtatccggcagctttggcgaatgtcactgggcacctcaagacgcgcaggtgtataacccggcctttgacgtcacgccggcaaccctgatcagcggttgggttctggacagcggcgtaatcacgccacagcaggttcaggccggatttttccagcctgaataatgtaaatgcacaagcgaccttactgagccgcctgcatttacattaatctaaacgaggataagcatcggctatcttatcgccggtaaaatgcgccacccaaccttccgggttatcaaatacccgaatagcggtgaaattcggtgccgatcccatatcaaaccagtgacgtgtatccgccggaacggaaatcaaatcgtttttttcgcagagaatctgaaagattttcccctctaaatgcagacaaaacagccccgcgccttcgacaaagaaacgcacttcgtcttcgccgtgagtatgttcggataaaaacttctgtcgcagagtttctcgctgagcgttatccggacgcatactgatcacatcccaactttgatagcctttttctgccaccagccggtctatttcatgttgatacgccgcaattactgcttccggcgacggatttccccccaacgcccgatccgcacgccaacgctcaaaacgcacgccaatacttgccaactgcttctgaatagccgttgcatcagtgctttgccagataggctgttccggctgctcatcgctgaaaatagtcaaggcactcatgatgcaaactcctctaaaacgatctgatcgaaacagttaacctgccgatgatggctttctgcatccggcaaatcgcgaatcagctggcaagtctgccaaccagcctgctgagcggcgtccagctcctgacgaatatcggataaaaacaggatatcgtgcggtgcaacggctaagtgctcagtaatattctgataagcggagacttcgcgcttcgcgccaacgcgagtatcaaaatacccgctgaataacggctgtaaatctcccgcatcactatagccaaacagcagttgttgcgcctcaactgaaccagaggaataaacatatagctttaccccttgatgctgccaattagccagctgcggagccacgtccgggtaaaggtgaccgcgaaaatctccgttttgataaccagtacgccagataatgccttgcagagcttttagcgcggtagacttacgatcctcatccataaaaccgaatagtacgctaataagggtttctatatccgcatccggctgaccaatttcacggcgtaaatctgccagcagaacggtcacgtcttcttcgctggcgtgctgacgcaaaaaatccgctaatcgggcgcgagcgtaaggaaaaagtacctgatgcacaaagcgaatatcgctggtcgtaccttcaatatcagtaacaatagcctgaatcatttgacctccagcaggcggcgttgtaattcgcactggaacaggaattctaatccttccagatgacggcgcgcttctgccactgagttcccccagcaataaagcccgtgacctcgtaccagaaaaccgtagcgtaacggtgccaacgctgcgcggcctgccactcgctcagccaatgcgctaatatcctgatcgttatcaaaaataggaataaccacggtatccaaatgggatttctgacccgacagggacttctgcatttcataaccctgtaaaaccaatccatcacttttttccacgcgagaaagtaccgtggcgttcaccgaatgagtgtgtaaaaccacgctaacatcaggatataaccgatacagcaaagtatgcaggccggtttccgccgaaggcgtacgcccgctgggcacgtgattggtggcaatatctacgctcaggaaatctttcgccgtgaggcgacctttatctttgccagattcactgaccaacgcgtattcactgtcggcacgcagtgacatattaccgccagtcgccggacaccagcctttgccgccaatccagtggcaggccgcaagtaacgcctcaagttgtgtctgttttgccatttccctacctctgcaattgttattttcgccgtgcaacaggggaatattccacgctgcccccctatgagctgacattaacacaaaaaatcatttagccgtttaaacatctaagcgtcttgattgccaaatcttaacatcgtgttatattgacagcaacatcagcgccaggagtttcagcccagaatgagcactttatcattgattccagacagtaaattacctgcccaaggcaccaccatctttacgcaaatgagtgcgctggcgcaccagcatcaggcaatcaatctgtctcagggattccctgattttgctggcccggaatatctaaagcagcgtctggcttatcatgttaatcagggagcgaatcaatatgctccaatgactggcgttgcagcgctgcgagaagcaattgcagataaaaccgccgccgtttacggctggcgtcctcatgctgatagtgaagtgacggtgaccaccggtgccagcgaagcgctgtttgctgctattaccgctctggtgcgcaccggcgatgaagttatttgctttgatcccagctacgacagctatgcgccagccattaaactggcgggtggcgaagtcaaacgcatcgccctgcagcctccggcgttcaatactcactgggctgaattctccgatttgctgaccgaacgcacgcggttggtgatcgttaacactccgcacaatccgtcagcaaccctatggcgcgcggctgattttgagcaattatggcaagccattgccgatcgcaatatttacgtcattagcgatgaagtatatgaacatatttgtttcgccgctgaaggccacgctagcgtgctggctcaccctcaattgcgtcagcgggccgttgccgtatcttcattcggtaaaacctttcacatgaccggttggaaagtcggttattgcatagcgcccgccgccatcagcgcggaagtgcgtaagatccaccaatacctgaccttttccgtttgtacgccaattcaattggccctggccgatatgctgaacgccgagcctgagcactggcagcaactgcccgatttctaccgcgctcgtcgggatcgcttcgtacaggcgctggccgccagccgcctcaaaatattacccagtgaaggaacctacttcctactggtcgattacagcgccgtttccgatttgaacgacgtagatttttgcctgtggctgacggaaaaaatcggcgttgcggctattccgttgtcagtattctgtgaggctccttttcctcatcaattgattcggctgtgcttcgctaagcaggaagccacgctggacgccgcagcggagcgcctatgtcaactttaaaactgactctactacaacaaccgttagtctggctggatgccgaagcgaatttacgccattttgcgaagctgctcgaagatatccaccagcgagatgtcattattctgccggagatgtttgtcagcggcttcgccatgaacgccgccgagttcgcgctaccggaggcggaaatcctcgattggctccgccattgggcagggaaaaccaatgcattactcggtggaagcgtagcgctgcaaacgccagaaggcgcggtgaaccgctttctgctggttaaacccagtggcgaaatacatttttatgataagcgccatctgttccgcattgccggtgagcaccatcattatcaggctggaaaacgacgtaaagtggtggagtggcgtggctggcgtattttgccgcagatctgctacgacctgcgcttccccgtctggtcgcgtaaccagcaagactatgatttagcaatttatgttgccaactggccagcagcgcgagccaaacattggcaaaagctattgcctgccagagccattgaaaatcaggtatttgtcgcaggatgtaatcgggtaggtgaagatgataacggccatagttatcagggagatagcgtgattatcgatccgcagggcgagattctgagcagcgcgcctttgcatgaaagagccagactggacgccacactctctctggcagcgctaagcgactatcgcgagcgttttcctgcctggcgcgatgccgatgattttctactgcaccactgatattgagtcgaaatagctaccgaaaaatagcgatgttaaagcgcgtctctcacggcgcgttttttattagcttcatcgttggaatagacagaaaacagtggttgggatgacgaaaacgacaaagccctgagttattgctaactcagggcttctgaatattggcggtgcggacgggactcgaacccgcgacccccggcgtgacaggccggtattctaaccgactgaactaccgcaccgcgctgttgttccggttaagaacgggttgaatattacggttaccccgctatttcgtcaacactttttcctgaaaaataaaccggttgcacagattttcacccaaacgatgaattatcccgcattgactgccgtttcatcttcagcagaagcccgccacaggcagcttccacctttcttctgaaccaaatccaaacgctggttatgagcttccaattcttcatcactggcgtaaataattttcagcccgctggccggacggacgatacgttgaatatcatcggtagaatctgattgattctgatccccttccattgagaaagacagcgaggtttgcccgccggtcatcgccagatagacttcagccaaaatctcggcatcgagcaatgcgccgtgcagcgttcgcttagtattgtctatcagataacggtcacataacgcatcgagattgttcctcttaccggggaacagacggcgcgccaataaaagactatcggttatggtacagaaggtatccgtattcggaattccctgctgtagcattcgaaattcatagtccataaagccgatatcgaacgccgcgttatgaataaccagctcggctccgcgaataaactcgaggaattccggggcgatatcggcaaaagttggcttatctgcgagaaactcatcgctaataccgtggacaccgtaagcttctggatcaaccagacgatccggtttgacatagacgtggaaattccgtccagttaaccggcggttgatcacttcaacagcaccgatctcaataatacgatggccttcatagtgaacgcccagcttattcataccggtggtttcagtatcgagaactatctgtctggtaggtgttgggatcatattgcagtgctcatagcgctcgtttatgtcagacttaaggtttaaaactcattaggaagagtctaccagagatgaccaaacaggtagaaattttcaccgacggatcttgcctaggcaatccgggtcccggtggttatggcgcgattttgcgttacaaacagcacgaaaaaactttcagtgaaggctatcgtctcactaccaataaccgtatggaattgatggcagccatcgttgctctagaagcattgacatcaccctgtgaagtcacgctcagtaccgacagtcaatatgtgcgtcagggcattactcagtggattcataactggaaaaaacgcggctggaaaacggccgaccgcaagccggtccgcaatgtggatttgtggaaacggttggacgcggcaatttcggatcataaagtgcagtgggagtgggttaaaggccacgcagggcacccggaaaacgaacgttgcgacgtattggcgcgcgatgcagccaacgctcccactcaggaagataccggctataatccggactaattccgagtcttaagggcgattacggtaacttttcgttgcgcccacggttcggcttaaccagggttttcgcgatcccattttcattgggttgaacgtcagtggaatcgtgcgttttctggccacaatcagactgatgcaacctaatgcatgtagatgggtgctgataaagcgcccgccttgtttatgccacggcagtacgtggaaactggattcatgcatcacttcatagttcagcaggctgagccaatccagtaaacgcatttgcgtaaacattctgctcgcgtaaggttggcgtcgacgtatcaccggcagtaattttccaaccccaagtaaactcaacggattgaaagtgctgattaccagccaaccatcgttgatcaacacgcgatccgcctcgcgtaaaattcgatgaggatcggttgaataagccagcgtatgagataacagacaggcgtccaccgatttttcagcaaaaggaagctggtaaggactggccagtacctgcatattgctgcccttatccccaacgttaacctgatgggaaacagcgcagctttcactggcaatctccgcactgagttgcccaattttaagcagatgaaaaccgaaaatctttggccaccagggctgtagctgttgctcaatagcggcccgataatactctccccaaggtagctcggcccaggaagctggggcaggaatcttttggcgtgtttgcgctggtttcatgttttattatcttctatcaagctgttgccaacgagaggtatccgatgaatcttatcagcattcctgcatttcaagacaattacatttggctattggttaacccgctgcagcgctgcctgatcgtcgatccgggagaagccgcgccggtactgagcgaactaaaagaaaaaggctggattcccgaaggaattctgttgactcaccaccatcacgatcacgtcggcggagtgaccgaaatactccagaacttccccaatattccggtttatggcccgcaggaaacggcacataaaggggctacgaatatcgtaaaagacggcgatagcctgtctttgtgtggacaaattttcagcgtaattgccgttcccggacacactctcggccatatcgcatactacagcgcaccttatcttttttgcggtgatacgttattttccggcggctgcggaaggctgtttgaaggttcgccccaacaaatgtacgcatcaattcaacgactcgcacagttggccgatgaaaccttaatttgcagcgcgcatgaatatactctttcgaatcttaactttgcccgtgcagttttaccacaagatcgagatattgaaacatatcaacaacaaatcaagcaattaagagcaaaaaaccactcaagcttaccctcaaaattgcaattagagcgtaaaattaatgtttttttacgctgtgatgacattgatttacaaaggaatttaggtatagacctcccacctaatgacctctccctgatttttgctgaattacgtgcccgtaaagatagcttctgaagcttttagttgtgttatttgtcgaagcaaagtatgattgctcgtcttttaagcaactaacattgacacacacatgaagaccaaagcgatatttctcgcctcagtcttgcttgtagggtgccaagcgtccaggcaggacgtgcaggttcccgtgcagcatgcacagagtttgtcttcggcaggtcaagaaagtgaagcaggaaagtacacggatagtgcccgagagggctccgcgcgatggctggaaagtgataccggcgtcgcgcagaacgatctgtggaacttcattagcgacgagctgaagatgaaggttcaggataatgccctgatccgtgaacaaaaacgaaagtatttaaaaaataagagctatctccacgatgtaacattacgggcagagccgtacatgtacctgatagtcgagcaaattaagcaacgtaagatgccgatggagctggtactgctacccatagtggagagcgcttttgacccacacgctacttcctccgccaacgccgcagggctatggcagatagtaccgagtaccggtcgaaattatggattaaagcaaaaccaatggtatgacggccgccgcgatgtggttgcctcgaccaaggcagcgcttgatatgatggaacgcctgaacaaaatgtttaacggtgactggttattaaccatcgccgcttataacagtggtgaaggccgagtcatgcaggcagtgaaagccaataaagccaagggtaaaccgaccaatttctgggcattgtcgcttccgcgtgaaacgtcaatttatgtccctaaaatgctggccttgagtgacattatcaagaacagcaagaaatacggtatcaagttacctgaaaccaacgaaaaccgtgcattagcgcgtgtggacgtcggtcagcagatagagctaactcaggcggctgagatggcaggaatgtcgctgaccaagctgaaagcttataattcagggtataagcgcaatgtaacggcacctaacggccctcattacattatgttgccgaaaacccatgcagagcagtttaaagactcactggctgacactgatattgttgtgtccaaatccactcaagtggctaataacacaaaaacatcagcatcaggttcgcagtataaagttcgccctggcgacactttatctacgatagccaagcgactgaatatcaagaccagcgatttgcagagttggaacaacttacgtacctcgagtaccttaaaagttgggcaaaccctgcaattggcaagcaatacggccagcaaaagcatcacctatcaggttcgtaaaggtgattcatttgccagtattgccaagcgtcacggtgtaaacaccaacgatgtgatgcgatggaattcggtagtcagcaaggccaacagtttgcaacctggtttaaaattgaccctatatgtcaacggtcaaaaagcgccagatgcgtaatgcattaaggttataacggctaaaaagcacccttcggggtgctttttttatgtctgcaatttgtcattaatgaaggttgacgcgagcgaattaaggtttgaattcaaccagtaagggattgtgatcggaggctctggtcaccatcacttcggcatcagcaacttttaattcgcggtaaaaaacatagtccaacggccggccaaaagctcggctacgattatcggcctgaaactcgacttcctgtaaaccctggcttctggcgaatttcagtaatgctctaattcgctgacgactccaggcattaaaatcgccagccagaatcaccgggccacgatgcattgagatttgttcaccaatgggttccaactgcttgctgtaaacgtctacgcccaagctaaaattcacagcatgaatattggccaccatcagcaatcggccatcatgaatgggataaactgttaccaatgctgatttagccaagcgtagcaggggttcacgctctcgcagcgggcagcagtagactgggtgagcggcagcaagcgtcattacgccagagggatgctgaggcagcgcaaaggcaggcacctgatcggctgcctgaaaattagacgtcgcaaatctcaccagttcaggggtggtttgtgcttcttgcaacagcatcagttgagcatctctgccaaaacctctcagcacagagagccaatctggccgctgctgcttaaagatattccataccataatccgcagacgctcagaagtcggtaatggaacgcccggaggtagtccctgccctagctgactggcagagcccggaaagatttgctcgactggttgccctgcaacatagcgcatggcataggtttttttcggcacgctcttgcccattcccgttaaaaacaaactggccagatggaccagcctgtaattgagtattatacgctcagatattcttcagccagacatttcttttgctggctatcaacacgtccaattgaggaatactgtctgatagcgcgaacggactcaagtccgaataggcaacgaggatgatttacatcataaaagaacacgcttttcgcgggcttagagcacgtataaattatttgaataacatggtttggccaatcgtttcagcttcccatgagttctatccgtgttgatgataaatcagctggctatcgctgggcgaaaatgccgtttatccaaccggccgctaaccctaatcagcgccaacgctccaatcactatcacaccgccaacccagggggtttgagctaattcccattgggaaacgatctgtccaccgataagcgatcccaaggcgatccccacgttaaaagcggcgatattcaaccctgaagcaatatccaccgcatgtggcgtatattcctcggctttctgtaccacatatacctgcaagccaggcacgttgccaaatgcaaagattcccatagccattaaagtaattagagcggcaatgctgtggctcgccgtaaactgaaaaataaacagtagcgcagccaacgcagtgaaaataaagctcagtgccggtaccgcaccgtaccgatctgctaatttaccgccccaaatattcccaatcgcgactgaaactccgtatgccagcaagatccagctcaccgctggcgcagagaaaccggccaattcctgcatcatcggtgccaggaaagtgaacatagtgaaaacgccgccgtaccccagcgcagtaatggcataaatcagtaataaacgcggatgagttaatacctgcaactgctgctttaaaccggcactggctttattgggaatattactgggaatcaaaataacgctggcaacgatcgccactgcaccaatcaatgagacagctaaaaaggtttcacgccagccaaaatgctgcccgataaaggtacctagaggcacgccagtgactaaggctaccgtcaacccaccaaacataattgcaattgcagatgcggctttctctttcggcaccagaccggttgcgatggtagaaccgattgagaagaacacgccgtgagccagcccggtcagcagccgagccactatcaacgattcataacccggagcctgccatgccagcacattgcccagagtaaatagtatcatcagaccaatcagcaaggttttccgaggaatacgccctgttaatgcggtcaatactggtgcgccaattgctacgcccagcgcgtaaatagaaaccagtaaaccagctgatggtaccgaaacatttagctgttcagcaatcgtgggcactagcccaacaatcacaaactcggtggtaccaatagcaaaagcgctaatggtcaatgctagtaaggctaaaggcatcgttgactccagataaaataagtatcgacttgataagccgcattatgagcttctctctggatgacaaaaatgataaaaatatcaaaatatttttgctggattagcaataatgaaagctaactctgatgagctaattacctttgtaaccgtggttgaatgcggcagtttcagccgagctgccgagcagcttgaacaagctaactccgtggtcagcagaaccgttaagaagctagaaaccaaactgggcgtaacattgctgaatcgtactacacgacaaatcagcctaacgcaggaaggcgagcattactttagacgcacgcaggcgattttgcgtgaaatggcattggcggaaaatgaactgctcgataatccgctgaatccaagaggactattgcgcattgatgcctctactccggtaatcttgcatatgctggcaccgctagtggctagtttcagagtgcgctatccgttaatggcactctcattagtttcctcggagacatttatcaatctgatagaacgtaaagtcgatatcgccattcgcgtaggcacattgcaggattcaactctgcgcgccagaaagctgatgaatagttaccgccatattgtggcttctcctgcttatctacagcgctacggcactccacgcactgcggctgaactacagcaacatgtttgtctgggatttaacgatctcccagcgctcaaccgctggccgctattagctcatgatggccagttactggagattaactcggatgtaagttcaaataatggggaaacccagcggcggctttgtcttgaggggaatggtgttgcctgtttgtctgactttatgattcaaaaagatattgatcggggagacttagttccgatattaaaggatctgacgattccagtcgtcatgccaatcaatgcggtttattacagcgatcaggctgtcagtagccggttgcgctgttttattgacttcgtcaccgagcgattagcggaaaatagcaatgaagcaacaacctgacggcaaatatgccgtcagatataacaggctggcattaatcccaatccggagccaaaccttcagggctaaccagacgctcattacgatccaaggcagccatttgtgccatgttttcgtcggtcaattttaattcctgagccaatagattactggctaaattagcttctttggttgaggacggaataaccgaataacctaactgcatcgcccaggccagaataacctgcgccggcgtagcattacgcagtttagccatttgctgaatcactggctcttgcagagctttaccgtaagccagtgtcatatatgaagtaatcgctataccgtgctggcgagcaaacttcaccactttggcgttctgtaataatggagatagttcgatttgattagtagcgatagcttcggctccaacggcatcaatcgcttgctgcatcagatcgatagtaaagtttgaaacgccgatctggcgagtcagacctaattctttagccttcaataactcagccataaactcagcgactggaacttcattctttggtgatggccagtggatcagcgtgagatcgacataatccgttttcagtttttgtaagctttcacgcagagtgggaatcagtttttccgtagacagattggcgatccaaattttggtggtaataaacaactcttcacgcttaacgccactctcagcaatggcttgcccaacagcggcttcattttcatagatttgtgccgtatcaattgcgcgatagcccagtttcaacgcggtggaaactgaatcgataacaacctgatcttgcaggcgaaaagtacccaatccaaatgcagggatgctcattttacttcctcatattttgtctgatcgtcatatctatcattagtcattgtttgcctttcactgcggcgaccgataatcccgctgccgttgaaagatgaactgattatggcctgagttttatcaacaaaaaatgtagtattcagcataatacttttgataaaaaatcaaatataggaaagtaattattgaatctgatagtagcaagccgtacataaaacgttcttaaggcggctcaaaactctttatcaccaaaggccacacctatcaaaagtgatataattctcagttatcccttttaaatgacccatcgcagtaaaaataaacatgattttcggagcacttaagcgacttatttacgcatgtatagtcgttagccaaaagattcaaagcagagaaaacaaccgagctacggcaagcaattgtaagaggtttatgactaagtgattggctataaggtgttgagaatccattaaatgaaatcaaaaagataagaatatagggatagggatagggatagggatagagatagagatagtattgatgattagtatttacccgctctgcttatctgagcgaaaaattctaaagattaaaatgcaaaaaaccctgaatcaaagattcagggttatgcaataagtggcggaacggacggggctcgaacccgcgaccccctgcgtgacaggcaggtattctaaccaactgaactaccgctccaccgattctgttacttatacttccgtatatattcccgttagggccagcatgtccttgctgtttagccaccagatgtcactctgataacttgtgtttgatgcctggcagtgtcctactctcgcatggggagaccccacactaccatcggcgctacggcgtttcacttctgagttcggcatgggatcaggtgggaccaccgcgctattgccgccaggcaaattctgtttcaatcaacccgccacgtgatttacaccacacagccagtcaatccaatctgttaacaatgctgaaaatcaaaacgctctctaaaacaccttcggtgttgtaaggttaagcctcacggatcattagtactggttagctcaatgcatcgctgcacttacacacccagcctatcaacgtcatagtctttaacgttccttcagggggcttaaagccccagggaagactcatcttgaggcaagtttcgcgcttagatgctttcagcgcttatcttttccgcatttagctaccgggcaatgccattggcatgacaacccgaacaccagtgatgcgtccactccggtcctctcgtactaggagcagcccctctcaatcttccaacgcccacggcagatagggaccgaactgtctcacgacgttctaaacccagctcgcgtaccactttaaatggcgaacagccatacccttgggacctacttcagccccaggatgtgatgagccgacatcgaggtgccaaacaccgccgtcgatatgaactcttgggcggtatcagcctgttatccccggagtaccttttatccgttgagcgatggcccttccattcagaaccaccggatcactaagacctactttcgtacctgctcgagccgtcactctcgcagtcaagctagcttatgcctttgcactaacctcacgatgtccgaccgtgattagctaaccttcgtgctcctccgttactctttgggaggagaccgccccagtcaaactacccaccagacactgtcctcaccccagattatggggccgagttagaacatcaaacattaaagggtggtatttcaaggttggctccacgcagactggcgtccacgcttcgatgcctcccacctatcctacacatcaaggctcaatgttcagtgtcaagctatagtaaaggttcacggggtctttccgtcttgccgcgggtacactgcatcttcacagcgagttcaatttcactgagtctcgggtggagacagcctggccatcattacgccattcgtgcaggtcggaacttacccgacaaggaatttcgctaccttaggaccgttatagttacggccgccgtttactggggcttcgatcaagagcttcgccttgcggctgaccccatcaattaaccttccagcaccgggcaggcgtcacaccgtatacgtccactttcgtgtttgcacagtgctgtgtttttattaaacagttgcagccagctggtatctgcgactggcttcagctccgagagcaagtctcttcacctagcgccagcgtgccttctcccgaagttacggcaccattttgcctagttccttcacccgagttctctcaagcgcctgagtattctctacctgaccacctgtgtcggtttggggtacgatttaatgttacctgatgcttagaggcttttcctggaagcttggcatcaactacttctgcaccgtagtgcatcgtcatcacgcctcagggttgatggttttccggatttaccaggaatacccccctacacgcttaaaccgggacaaccgtcgcccggctagcctagccttctccgtccccccttcgcagtaacaccaagtacaggaatattaacctgtttcccatcgactacgcttttcagcctcgccttaggggtcgactcaccctgccccgattaacgttggacaggaacccttggtcttccggcgtgcgggtttttcacccgcattatcgttacttatgtcagcattcgcacttctgatacctccagcagtcctcacagactaccttcaacggcttacagaacgctcccctacccaacaacacctaagtgtcgctgccgcagcttcggtgcatggtttagccccgttacatcttccgcgcaggccgactcgaccagtgagctattacgctttctttaaatgatggctgcttctaagccaacatcctggctgtctatgccttcccacatcgtttcccacttaaccatgactttgggaccttagctggcggtctgggttgtttccctcttcacgacggacgttagcacccgccgtgtgtctcccgtgataacattcttcggtattcggagtttgcatcggtttggtaatccgggatggacccctagccgaaacagtgctctacccccgaagatgagttcacgaggcgctacctaaatagctttcggggagaaccagctatctcccggtttgattggcctttcacccccagccacaagtcatccgctaatttttcaacattagtcggttcggtcctccagttagtgttacccaaccttcaacctgcccatggctagatcaccgggtttcgggtctataccttgcaactagacgcccagttaagactcggtttccctacggctcccctatacggttaaccttgctacaaaatataagtcgctgacccattatacaaaaggtacgcagtcacaccacgaaggtgctcccactgcttgtacgtacacggtttcaggttctatttcactcccctcgccggggttcttttcgcctttccctcacggtactggttcactatcggtcagtcaggagtatttagccttggaggatggtccccccatattcagacaggatgtcacgtgtcccgccctactcatcgagttcacagcatgtgcatttttgtgtacgggactatcaccctgtaccatgcgactttccagacgcttccactaacacacaaactgattcagactctgggctcctccccgttcgctcgccgctactaggggaatctcggttgatttcttttcctcggggtacttagatgtttcagttcccccggttcgcctcgttagactatgtattcatctaacgatagtgcaacgaattgcactgggtttccccattcgggtatcgtcggttgtaacgcttcatatcagcttaccgacgcttttcgcagattagcacgcccttcatcgcctctgactgcctaggcatccaccgtgtacgcttagtcgcttaacctcacaacccgaaggtgtctttcgacatcatcgtgctgcgattattgagagactctacctgcaggtgactccttgtctcggtaaatctacggagagacaagttttagctgcagtgtttcaattttcagcttgttccagattgttaaagagcaatatcttaaacacgactcgttaaagtcatctttaagatattcagttgataatgtctttcactcattatcggatggcgtccccaaggggattcgaacccctgttaccgccgtgaaagggcggtgtcctaggcctctagacgatggggacacaggaaattccgactaaatcaaaaacttaatcgtttctcgtgtcatcatgagtcgaaactcacgacatcaacaggtgctcttgctcattactattatcagacaatctgtgtggacactacgcaatgcgtatcattaggtaaggaggtgatccaaccgcaggttcccctacggttaccttgttacgacttcaccccagtcatgaatcacaaagtggtaagcgccctcccgaaggttaagctacctacttcttttgcaacccactcccatggtgtgacgggcggtgtgtacaaggcccgggaacgtattcaccgtagcattctgatctacgattactagcgattccgacttcatggagtcgagttgcagactccaatccggactacgacagactttatgtggtccgcttgctctcgcgagttcgcttcactttgtatctgccattgtagcacgtgtgtagccctactcgtaagggccatgatgacttgacgtcatccccaccttcctccggtttatcaccggcagtctcccttgagttcccaccatgacgtgctggcaacaaaggataagggttgcgctcgttgcgggacttaacccaacatttcacaacacgagctgacgacagccatgcagcacctgtctcacagttcccgaaggcaccgaagcatctctgctacgttctgtggatgtcaagagtaggtaaggttcttcgcgttgcatcgaattaaaccacatgctccaccgcttgtgcgggcccccgtcaattcatttgagttttaaccttgcggccgtactccccaggcggtcgacttaacgcgttagctccggaagccacgcctcaagggcacaacctccaagtcgacatcgtttacagcgtggactaccagggtatctaatcctgtttgctccccacgctttcgcacctgagcgccagtctttgtccagggggccgccttcgccaccggtattcctccagatctctacgcatttcaccgctacacctggaattctacccccctctacaagactctagcttgccagtttcaaatgcagttcccaagttaagctcggggatttcacatctgacttaacaaaccgcctgcgtgcgctttacgcccagtaattccgattaacgcttgcaccctccgtattaccgcggctgctggcacggagttagccggtgcttcttctgcgagtaacgtcaatcacttcacgtattaggtgaaatgccttcctcctcgctgaaagtgctttacaacccgaaggccttcttcacacacgcggcatggctgcatcaggcttgcgcccattgtgcaatattccccactgctgcctcccgtaggagtctggaccgtgtctcagttccagtgtggctggtcatcctctcagaccagctagggatcgtcgcctaggtgagccattaccccacctactagctaatcccatctgggcacatccgatggcgtgaggccctaaggtcccccactttgctcttgcgaggttatgcggtattagctaccgtttccagtagttatccccctccatcaggcagtttcccagacattactcacccgtccgccgctcgccggcaaagtagcaagctactttccgctgccgctcgacttgcatgtgttaggcctgccgccagcgttcaatctgagccatgatcaaactcttcaatttaagatttgtttgatttgctaccgaagtagcgatgctcaaagattactttctgcaaatatgcattcgaaccgaagttcaaatgtttactgctttggtcactcttcaagacttgatatttcttctgcctgccgaaacaggctttgatatcgccttgcgagtgcccacacagattgtctgataaattgttaaagagcagtgagttagcaacctttcggtgggtaactcgaggtgcgcatattacgctttcctcactcagagtcaactacttatttcgttgaatttctctgttctctttgccggccactcagttacttgattcgctgtgtgccgtctcgatggatgcgcattatagggagttccgcgcaggccgcaactgctaatttcaattaaaatgatcgtttgctgcattccacagcaaaaccccgctttataccttgttgtgcacaaacttatccacagatgcaatctgaactgaaaattgacgagcatcacgcaatcgttttcgctacaattccccgcgtcgaaaatgcgtgtcgatattcataaaatattgtccccgcggatcgattattggcaaaaggatgcaagcggagctgaaattaggtgtgtttttctacttttcacgcaattccactcctttgtacccggcagaaaacccatttcgggacgttatctgaatctgttcctttctatatagatagaagtgcaaggtagagattcacgtaacgctctatttatagcgaatgaaaaactgcgattccaaagccaagggataaaaccatgcaacaacgccgtccaatccgccgtgctctgcttagtgtgtctgataaagcaggtatcattgaattcgccgaagcgctttctcagcgtggcatcgaattgctctccaccggcggcaccgcgcgcctgctagccgacgcaggcctgccggttaccgaagtttctgattacaccggtttcccggaaatgatggatggccgtgttaaaaccctgcatcctaaaattcacggcggtattctcggtcgtcgcgatcaggacgatgccatcatggcagaacatgatattcagccgatcgatatggtcgtagtaaatctgtatccttttgcccaaaccgttgctcgaccggattgctccttagaggacgccgttgagaatatcgatatcggcggcccaaccatggtgcgctccgccgccaagaaccacaaagacgtggccatcgtagtgaagagcagcgactacgcggcaattatcaccgagctggataacaacgacggttccctgacttacccaactcgcttcaaccttgctattaaggcgtttgagcatactgccgcctacgacagcatgatcgccaactactttggctctatggttcctgcctatcacggcgataccgagcagcctgctggccgcttcccacggaccctgaatcttaactatataaagaaacaggatatgcgctacggtgaaaacagccaccagcaggccgccttctatatagaagaggaagtgaaagaagcttccgttgctaccgcagagcaacggcagggcaaagcgctttcttataacaacatagccgacaccgatgccgcgctggaatgcgtgaaagaattcagcgagccagcctgtgtcatcgtcaaacacgcaaatccatgtggcgttgctatcggggattccattctggcagcctacaacaacgcatataaaaccgatccgacttccgcgttcggcggcattatcgcctttaaccgcgaactggatgccgaaaccgctcaggctattatcagccgtcagtttgtcgaagtgattatctccccaagcgttagcgcggatgccctgaaactattagcaaccaagcagaatgtgcgcgttctcacctgcggtcagtggcaaggacgatctgtcggtctggatttcaaacgcgtcaacggcggtttgctggtgcaagatcgtgatttagggatggtgactgaagcggatcttcgcgtagtgtccaaacgtcagccaacggctcaggagctgcgtgacgcattattctgctggaaagttgcgaagttcgttaaatccaatgccattgtctatgctcgcgataacatgaccatcggtataggcgcaggccagatgagccgcgtctactccgccaagatcgccgggatcaaagccgcagacgaaggcttgcaggtggccggttccgccatggcgtccgatgccttcttcccgttccgtgacggtattgacgctgccgccgccgtgggtattacctgtgtgatccaaccgggcggttcgatccgcgacgacgaagtgattgcagcggcagatgaacatggcattgccatgatcttcaccgatatgcgccatttccgtcattaattaacctcacggagttatcccgatgaatattttgattattggtaacggcggtcgcgaacacgctttgggctggaaagccgcgcagtcacctctggcggataaaatctatgtggccccgggtaacgccggtaccgcgctggaaccgcgactggaaaacgttgatatagccgcaacggatatcgccagcctggtcgctttcgctaaaagccacgatatcggtctgaccatcgttggcccggaagctccgctggtgattggcgtggtggatgctttccgggaagcgggtttgactatctttggcccaactcaggctgcggcgcaattggaaggctctaaagccttcaccaaagacttcctagcccgtcatgatattccgacggcgttttaccaaaacttcaccgaaatcgaaccggccttggcctacgttcgtaagataggcgcacctatcgtcatcaaagctgacggtttggccgcgggtaagggcgtgatcgtagcgatgacgctcgaagaagcggaaaccgccgttcacgacatgctggcaggcaacgcttttggcgatgcgggtcatcgtatcgtggtggaagaattcctcgatggcgaagaagccagctttatcgtcatggtcgatggtgaaaacgtattgccgatggcaaccagtcaggatcacaagcgagttggcgatggcgataccggcccgaataccggcggtatgggcgcttattcaccggctccggtagtaaccgatgaaattcaccaacgagtgatggatcagattatctggccaacggtgcgcggtatggcggcggaaggcaatgtgtataccggtttcctctatgctggcctgatgatttctgcagagggtcaacctaaagtgattgagttcaactgccgctttggcgatccggaaactcagccgatcatgctgcggatgcgttctgacttggtcgagctttgtctggctggcgctcaaggcaagctgaatcagaaaacctccgattgggatgaacgaccgtcattaggcgtggtgctggctgcgggcggctaccctgccgaatatcgtcagggagatgtcattcacgggttgccacagcaggaaatcgcaggtgaaaaggtgttccacgctggaacccgcctagctggcaataatgacgtggtgaccaacggtggccgagtgctctgcgtgaccgctttaggcaaagacgtcgcggatgcacagcagcgggcatatcagttggcttcagacattcattgggaaggtagtttctgccggaaagatatcggctatcgcgctatcgctcgcggtaaataatctggtattccagagggcgcaacgcctgcgccctcttcttcagtccaggctacaaacatccatttcgatacaagcatgctaaataacgcggtattaacgctacaaactgccgggctctggctcccaacgacaaaaatcttcatttgctactaacaacaactcttgcccttccggcgcattcaaccaggcgacaccgagtggttgctgcgtattactcgcccgtttagccagccacgcctgcgcatagtcttcaaacttaggccgctgaacgctgccgctacagctcgtcagcacgccattttgcaagcgaccttgaatcagatccacattaccggcacgtagagtggtactcagttccagaatacgtttggcttcaaactgatgaaaagcgatctcatccgccgtcagcagctcgcggcgcgaggccagttggcgctgcataaaactcaccgcaccctgttcatcaaaacgaagttggatggtttctggattttggccgatatcgtttcgccgaatttggcgcagaattccgtgctgatattcatagaaggccacgcgagtgacaccgccctggtaagggctgtaaacgctcataatcacttggggatgttgctgagaatcatcctgacgccagatgcgaactacaccgctatcggcaatgtaaccgctggcactgaactggggggaatcggaatggctgctacaggcgctgagaccaatggcaaaacccaaggtcatcagcacccgccgcataaacaaaaggggctttgccacccctctgcttattattttcactgacacactattatttaacagagtctttcagtgctttgccagaaacgaacgcaggaacgttagctgcagcaattttgatttctttaccggtctgtgggttgcggccagtgcgttcgttacgatgattcactttgaaagtaccgaaaccaaccaattgtacttgctcgccttctttcagagactcggtaatggcagccagagtggactccaaagcagctttagcttgggttttggaaaggtccgctttgtccgcgattacgtcaatcagttgagtcttattcataagttatccttacagtgtgtttatcgtttgcaaagcatcgagtgcgacggatatgccgaatgacagcactctcctgcatacacgcaccgatagccactttttttcgccccccaaatgtagaacagacagggggcagatgtgaagccttaaggcacgacaaatcaggcgttaaatcacgttttcttgccttattgcgttaaatttatgccaatgttactcacagcggcttcccgcaggtcagatcgtaaccctttgatcagatctaaatcgcgttcttcacagtcggccaacaggcggaaaatctcccattggatgtcccattcttcttcaaccgccggtaaaactttcagttcttcgtcggtcatttctttgccagcctgagtcatttccagcatggcaacggtgcgaattgacgtctcgctgatagcaatagcatgttccagagtttcaccgcttaaacgcgagtgaatggcctcacctaatgcaatgcaggcatcaatggctggatacacgccgtaaatggcgtaatcgtcagcggaaggaatcgcttcttcgagcttttccagttggctatcgaagttcactttggcgtcttttaccaccagcgtttcccagatcaaatccagaatacgtcgataaaccgccggatcgccaaattcggtttccaggcaaaatttctggtaattcggatacatacgctcacataagcacgccatgaaagtcagatgttgccagctttccagcttttcgagacgtaaatggattgggttacgtaacatgatcagatctcattcttcattatctgcgcggcagtgtacccgaaattaaatcatatacctatgagagaaaaaccgcctcgctcggtgctaaataagataatttcagaaatgccaatcgtccttcatgttaatctgccaaggtgactaattggtacaaagctaattatttactagaaaataaatatacctacacctgcttcgtcccacttccaatcacgccaacacggtatcaaatcaagccagattcataatcagcgcaagatgaaaaccgcctgatcgatcacagcaaaacatcttcttgctattaagcaggtcaatgccaacggaaccggagtgacccaatgatacgagcattattaaaaaataaatggatatttagtcttctattcttcgctgagacagcgctttctgccgatcttctcgataaggtattacgtgaaactatagtttatcaatctgttattgaggcctcatcggggaaaacattcacaatccggattaatctgtaccaaccggcgggaaatggcccttttccgctggttattctcaatcacggaattgatcctgacggaaaccaaaatgagcgcacgcgctttcacgttgcggctcgcgagtttgtgaaacgcggctacgtggtgatggcgccacagcgtttcggatttggtggttctgaaggaccttttgacattgtgccctgccaacctgatagctacgcttcccgttcgctgcaagaactgaatgccactctaagccatgcccgccagttgccctatgtggataatgagaaaatcattattgccggtcactccgtaggaggacttatcacaatgaaggccggagaacaggagatgcagggcgtgaaaggcctgattaatatggcgggcggttataaatggcctgactgcgactggaaaacacccttgagggcaactatgcagcaggcaggacactcttcccttccctcgttatgggtttatacggaaaatgactcgttattctcaattgagctgggtagggccatgtttgagtcatatcgggagaattggttaaaaactaatggtgctcatgaagtaatgccacgttttgttgcgttaaagccctttgccaatgaaggccatgcttttttccagtggcaggatggagtccagttctggtggcctcccgtggagctatttttgaccgaattgggtttaccaacggcgattgtcacagacatcactgcgcccagccgaaccgaagccagcggtttcgccagtatcaatgacgtcgaaagtgttccttttagcgaacgcaataaagaaagtggacaagaggcttataaacagtttttagatgcaaagtcgccacgggcttttgcattgagtgaagatggcgatagctggggctggtttaatagacaaaataacgtactggaagatgcgctggagctttgtaataacaatacgctaaaagcctgtcggatttacgccaacgacggtgatgtggtttggtaatatttcacgccggactgatatctgacaacgaatccggcgagtttttttaaccttttgtcgctattgccagccaacgctgaaaagcaggtcgattcgacgcgatagcatcagcccaacgtgttggctccggtaaacggtaaccccgcatacagttttgaacccaaaccaatgcgctatccatactgatacggtgccctggcgaaataaacagcggattacagcgcggtttactccgccatacccagcccaatggttcatccccatcaatcaatggttgcaaggtattgttttctaaaggggaaaactgaccgcacaggcgacttttcgccacgccaatggttggtacatccgccagcaggccaaaatggctggctacgcctaatcgacgtggatgcgcaacaccctgcccgtccaccagcactaaatcgggccgatgctgtaactgcgcccaggccgccatcaacgcgggatactcacgaaaagaaagcaaacccggaatatagggcaaggaagtggcaactctggctatttgatattccactaactcaagggagggataacgtagaatggcgatagccgctcgcgttaccgtcccctgttgctcaaaaccgacgtcggcaccggcaatccattgtggcaccctgaagtcaggatcgtcatggaggataatttccgcggctcgctgtcgttgttcctgacgcaatccctgagtatccaccctgtttcctccgcttagacgtggttttatcgatacgtaatattaatttatacgcgatcttggtttaaacatgatattggcgcgacaggttgtgtaccgcttcaacgaatacgcccgcatgctctggcggcacatcctgatggataccgtggcccagattgaacacgtggccttcgccatgcccaaagccagccagaatcgagcttacctcctgctgaatacgtgctgctggcgcatacaacaccgagggatccatattgccttgtagagccactttatcgcccacgcgacgacgtgcttcagcgatatccagagtccaatccaaccctaatgcatcacaaccggttgccgccattgcttccagccactgtccgcctcctttggtgaagagagtgactggcacacgacggccgtcgttctcgcggatcaaaccggcgacaattttgtgcatatattgcagggagaattcgaggtagtcacggccagtcaatacgccgccccaagtatcaaacaccatcaccgactgcgcaccggctttaatttgcgcattcagatacaaaatcacgctatcggccaatttatccagcagcagatgcaacgtagccggttcggcatacatcatttttttcagcttggtaaaggctttgctgctaccaccttcgaccatataggtcgccagcgtccacgggctaccagagaaaccgatcagcggcacttgccctgccagctcgcggcgaatggtgcgtactgcgttcatcacatagcccagttcttgctctgggtccggtattggcagtttttcgacgtcagcacgacaagtaatcggtgattgaaaacgcgggccttcgcccgtttcaaaataaagccccaatcccattgcgtcaggaatggtcagaatatcggagaataggatcgccgcgtccagcggatagcgacgcaaaggctgcaaagtgacttcacaggctaactctgcgttcttacacagcgccataaaatccccggcctgcgcacgggtcgccttgtattctggcaaataacgccccgcctgccgcatcatccatactggggtaacatctacgggctgacgaagtaaggcgcgcagataacgatcgttcttcaactcattcatatggggctcccttaatgatctggcgctattgtagcatgcctgatttagctgtcctgttcggtgcggcacaatgccacggtatcttcgattaaacggcgggctacagtaccgggcggcggcaacagcggcagttgatcgtaacgataccaattggcgttgagcaattcttttggatcgtggcgcaattcgccgctgtcatactccgccataaaagcaatcatcaatgaatgcgggaacggccagggctgcgaggtcacgtagtgtagatttttaatacgaatattgctttcttccatcacttcgcgggcggtcgcctgttccagcgtttcgcccacttcgacaaaacctgctaataccgtatgaatgccgccacgatgacgcacatgctgagccagcaaaatttcttcgccgcgccgaatcgctacgattacgcagggcgcgatttgcggataataacgttcacggcaatggttgcacagacaggcccattcggtgcggctggcatgcatttgatgaccgcagtaaccgcaaaaacggtgagatcggtaaaactccgccaattgcacgccacgaccagccaactggaataaaccgcgatcgacatccagtaactgacgcaccgatcccatttcgctggacatcagttggcgaattaaccaaaccgcctgcccttgccattcgccgatctgtcgggccgtttttccctgtaatgaccaaagtgccgcgctaccgtagggtaattcccctttgggcagccacaatttgttctcatggctaacgatccaccagccatgttcctcacctgtaagttgtagttccatatcgttgttgcacaacctcgacttcactggcaatctagaatctggcttgttacatttttgtaacctaccgttactttttcttactcacggagtcaatcatgctcaaccgactggaaagcctgactcaacgcgttggcggcagtaatgaattaattgatcaatggcttcatgcacgcaaagaactgttagtctcgtattgcaccgtgatcggtattaaaccgctaaaggaaaagcataccccgctcaatcaaaaagcgctggagaacttttgccataatttggtggattacctctcctccggccacttccatatttacgaccgaataatcaaacaggcagaaggtgcctctagcccaaaaatggcgctggcaaccaagttctatccggcgctaaaagataatactcaaactatcatggctttccacgatcgctataccgacaatgagatcgatcaggatagctgcttcgaattccatcaggcattatcggacatcggcgaagcgcttgacgctcgttttactctggaagacaaattgatccaactggccgccgaatcctgggaagccgctcaccctgcggccaccgaagatccgaagaattaacgccattattcgcgcggatctattacgcaaacttgagcttacactgagtcgcgagcatttggatcacagcccaaattcaaaacgacaaataaaatagcttataagacatacttgtagtttttattctctctcctatactgaggcttcttgtcggagtgcctagcgcaggctttttatccaagcaacgcgcaggctgagaccgttaattcgggatccgcggaacctgatcgggttagtacccgcgaagggaacaagagtaatttatcgctatcgcacggctttcacctttaatggatgagctccgtcgcacctggctaacatcgttactcccgccaagctccagacaagcaattttcccaataaaccacactggtaggaatttgctatgtctaataatactcatgcttctccattggctgcatcagccaaacccaaagcccgtccacgcaaagaacaacgtgaagatgcccaacagtttatcaatacgctacaaggcgttagcttccctaattctcaacggatctacctgcaaggctcaagatcggacattcaggtgccgatgcgtgagattcagctcagcccaaccttaatcggcggcggcaaagacgatcctcgctatgaagataacgaagcgattccagtctatgacaccgcgggtccctacggcgatcctcaggccaaactagatgttcacgcaggattaccgaaactgcgcgatagctggatcgccgatcgtcaggataccgaaatgctggagggcgtaagctccggtttcactcagcagcgtttagcggatgaaggtttggatcatttacgtttcgaacatttgccacgccctaaaaaggcgattgcgggcaaatgcgtaacccaactgcactacgccagagcgggtatcgtcacgccggaaatggaatttatcgctattcgggaaaacatgggtcgtgaacgtattcgcggcgaagtgttacgccaccagcacccgggacaagcctttggtgcccatttaccggaaaatattacgccggaatttgttcgtcaggaagtcgccgctggccgcgccattatccccgccaatattaaccatccagaatctgagccgatgattattggccggaatttcctagtaaaagtgaatgccaatatcggtaattccgcagtgacctcctctatcgaagaagaagtggaaaagctggtctggtccacccgctggggcgcggataccgtcatggacttgtccaccggccgctatattcacgaaacccgcgaatggattttgcgtaatagcccggtgccgatcgggactgtacctatctaccaggcgctggaaaaagtgaacggcgtggcggaaaacctgacctgggaaatgtttcgcgacactttgctggaacaagccgagcaaggagtggattacttcaccattcacgcaggcgtactgctgcgttacgtaccaatgaccgccaaacgcctgaccggcatcgtctcccgcggcggttcgatcatggccaaatggtgtctatcccatcatcaggaaaacttcctgtatcagcatttccgcgaaatctgccaaatctgcgccgcttacgacgtttcattatcactgggtgacggcctgcgccccggttctattcaagatgccaatgatgaagcgcaatttgccgaattgcatactttgggcgagttaaccaagatcgcctgggaatacgacgtgcaggtgatgatcgaaggtcccggccacgtaccaatgcaaatgatccgccgcaatatgacagaagaactggaacattgccacgaagcgccattctatacgctggggccgctaaccaccgatatcgcaccgggttacgatcatttcacttccggcattggtgccgctatgatcggctggtttggctgcgccatgctgtgttacgtcacgccgaaagaacatctgggtctgccaaacaaagaagatgttaaacaaggacttattacctacaaaatcgccgctcacgctgcggatctggccaaggggcatcccggtgcacaaattcgcgataacgctatgtccaaagcgcgttttgaattccgttgggaagatcagttcaatctagcgttagatcctgaaaccgcacgcgcttatcacgatgaaaccctgccgcaggagtctggcaaagtggctcacttctgttccatgtgcgggccgaaattctgttcgatgaagatctcccaggaagtgcgcgactacgcggcagcgcaggaggcagaggcccaaaaaatccagatccaaccctcattggaaacccagcaatccggcatggaacaaatgtccgccgaattccgttctcgtggcagcgagttatatcacagcgccagcattcgtcaggtagaggtcaatgatgaacaagcctgacgcaccttttgctactaccgaaaatcggctaggactttatccagtggtggattcactggaatggatcgagcgcatgctggaagctggcgttactacgctgcaactgcgtatcaaagacgcaacggacatgcaggtcgaggatgatattgccgccgcaattgccttaggtaagcgctatcaggctcggctattcatcaacgattactggcagttagccatcaaatacggtgcttacggcgttcatctgggacaggaagatctggaaatcgccgatttaccggccattcaacgcgccggtttacgcctcggcgtgtctactcatgatgagcaagaactggcgctagcgcgggaactgcgcccgtcttatatcgctttgggacacattttcccaaccgaaaccaagcacatgccgtcttctcctcagggagtcgcggcgttaacccgtcaggtcgccaaaacctccgatttccctacggttgccattggtggcatcactatggagcgcgtgccgcaggtagtcgccagcggcgtgggtagcgtagctgtggtcagtgccattactcgtgcggaaaattggcagcacacaaccgcggaattactgcgtttggttgaaggtaaggagacaattcatgccttatgaacagttgaacgatcaggatttcctgcgctatagccgccaattattgttggaagatatcggcccggagggacagcagaagttcaagcagtctagcgtgctgattgtcggtctgggcggccttggctctccggccgcgctgtatttagccgctgcgggagttgggaaactgtggctagccgatgacgatacattggatatcagtaacctacagcggcaggttctttattgcaccaccgatatcggccagagcaaagctcagttagctcagcgtcgtttacagaatcttaatccgcaaattgaaactatcagccttgatagacgtttagccggtagcgatctggctgacgccgttgccgccgctgatctggtgctggattgctgcgataacatggcaacccgccatcaagtcaacgctgcctgcgtacaagctggaaaacccttgattagcggcagcgcagtcggattcagcggccaattactgattatcgaaccgccttacgccaacggctgctacgcctgcctttatcccggaaaagaaacgcagcaaagaaattgtcgcactgctggcgtccttggcccagttgtcggcgtcatcggcaccctgcaagcattagaagcgataaaaatgctggcgggaatgccatcggcgctgagcgggaaactgcgcttatttgatggaaaacagcaaagctggagcactctacgcttaagcaaagcctgtcattgccaaatctgtggagaagcccagtgaaagtctcgatcaatgatgaactcatcgagttggaagctaacctgacggtcaattccatgctaagccaattgggttatgaccagccgggcaccgcgctggctatcaatcaaaccatcattccccgtgataactgggatcaccatttgttactgaatggcgatgacattttgctgtttcaagcgattgccggaggctgatatgttgaaaattgctgataccacttttacctcacgtttatttaccggaacgggaaaatttgccacgccagccttgatgctggacgcattgcgcgcctccgaatcgcagttagtgaccatggcgatgaaacgggtggatctgaaatcaggcaatgacgctattctggctccattgcaacagcttggtattcgtttgctgcctaatacttctggagcaaaaactgcggaagaagcagtgtttgctgcgcgtttggctcgggaagcgctgggtacgcattggatcaaactggaagtacatccagacgtaaaatatctgctgccagatccagtagaaaccctgaaagcggcagagattctggtcaaagatggctttgtggtcatgccttactgcggcgccgatccggtactatgcaaacgtctggaagaagttggctgtgccgccgtgatgccgcttgcttccccgattggctctaatctagggctgttaactcgtgatttcctgcggattattatcgaacaagccaaagtacctgtcgtagtcgacgctggaattggcgcacctagccatgcgttggaagcaatggaattgggtgcagacgcggttctggtcaataccgccatcgccgttgcccaatcgccagtgcgaatggcgcaggcatttaaactggccgtcgaagctggaacgctggctcgtctggccggtttaggccctcgccaacagcaggctagcgccaccagcccgctgaccgctttccttagccaaagtgaggaacgccataatgcctgaagactttcgtcatcgctggcagcagttagattgggatgacatttcactgcgcatcaacagtaaaaccgcccgtgatgtagaacgggcgttaaatagcagcaagccggatcgggaagatctgatggcgttgatttcaccggcggcgttagcttatctggaaccgatggcacagaaagctcaacagcttactcgccaacgcttcggtaataccgttggtttttatgtgccgctgtatctctctaatctgtgcgccaatgattgcacctactgcggtttctcaatgagtaaccggattaagcgtaagacgttggatgaagaggaaattattcgcgagtgcgaagcgattaaagccctgggatttgagcatctattgttggttaccggtgagcatcaaaccaaagtgggaatggactatttcaggcagcatttacccaccattcgcggccgtttcagctcgctgatgatggaggtgcaaccgctggaagaagaagagtacgccgagctgaaaaccttgggtttggacgcggtgatggtgtatcaggaaacttatcacaccgccacctaccaccagcatcatttacgcgggcagaagcaggatttccattggcgactcgccacgccggatcgtttgggtcgcgcggggatcgacaagatcggtttgggcgcactgatcggtttgtctcataactggcgtactgattgctatatgctggctgagcatttgttttatctacaacaaacttactggcaaacccgctattccatctcgtttccacgtttgcgtccatgcgctggcggaattgagccagcgtcactgatgagcgaatcgcagttggtgcaactgatctgtgcttttcgcctgtttgctcctgatgtagaactgtcactctccactagggagtcaccgttctttcgcgatcacgttattccggtggcgattaacagcgtcagcgccggttcgaaaacccagccgggcggttatgccgatgacgaacatccggagttggaacagtttgcaccccatgataatcgctcgccacagcaggtggcacaggctctcattcaaaccggcttacaaccggtctggaaagactgggatcgctatttggggcgttctctctcatcgctcggctctacacccatagattaagtgttgtaagggtgttgaattaaattattgagcgggtaaagcagctccagtgctggcagcactgaagctggctttaactcgattcgaaaagtcacagccacttaaaagttggcattaatcactgtgtctataatttcgccctcttgcgcatcaacacaatcagacacaatgatccccaaataacttttggttctatatttatattcaatagaaaaccacttattaataccatcatagtctgtaaatccgttagctccgataaaaggagtaaccaggtatccacctatacttgtgtaattaatatatatttcatcatctcttttacttttagccaactcgattaagtcattaatgggctttcttttatttattattgataatacggtataatcagaatattcgtcctgcacatgcactttacaataaccattatcgataacaaaagttttattatcttcccatggcatgatattaatcccctgctctccgccttgatatcgacgtaataggattatttttcctcgaatttcctcaatagagggtattctgttctcgataaaaaaataatcaatatatgcaactaagtaactttttaataaaacgtcgttaaatatttcgttgctaccctcctgttttatcgaaagcataataaactctgtcgggttattttttataaataccaagcaactagctaatacatcgctgaggttctgattcagatagacgttactatgatagagtgctaatacatcctcaaccaggcgacatcttatatccaagaaacgaatgccgttattcaattggatatctatatcccatagttgggtctgaatctgtcccgttggtgtcataaaaggaaaaaaaaccgctgagttatttgttccaggaatagatacgttactcagtaacattgaattacctaacttccccatccaattctttctattcataaattacatccttgtatgaagcttgaagtatgattgagcttatccagtcaatttcgtacgtttaatcgatgtcaaaatttgatctcaaaatgatattcatcattgctgcattattggtatcgacaaaatcagagactattattcctaattgacatgttttacatttcctgtattcatcagcaaaccatttattaagtccatgtataaaaacattacccaccgcccctaattttggagtcacagtcacatcacttaaactggtaaagttaatatataatgcattcttttccctaaccctggcacgttttattaatttagccacatattctcttttgttatcaaagtttgaaaaattatagccagagtatttatcttgaatatatatattgtaatttctatttttgatcgtaaaggtgtcattatctttccattgagtagcattaatacctaaatcacctccgtaataacgccgaaaaagaacaattttcccagcaatctccttaacagtcggaattttattttttatgaaaaaaaagtcattatgattttttatatatcgctcagacatgaccttgtgaaatggcatggtactatctttttcggtatattcttttttaactgaaagtataataaattctgtcggattatctgataaaaacttaatacaagtcgctaatatatctccgaaatttaaacctaaataaacgcttccatggtgcagagttaatacattttcaataagacgacacctgatatcgagaaatcttataccatgatctaattgctctcttatattccatcgctgcgtctgaacatatccaaatgaaataggatgatgggtatatgcagcggaatcatgagttccaggaatagagagttcactcagaaaccttgattcatctaccaatccgatccagttattagtagcacctatcataaatttatatccttatataagataaaactcctacgatatatagcaaatactctattacaattaacataattcagaaaaacattctatcgagaataaatgtaagcatgcagacttattatagaaataataaaattaaaaatagaatgtattgaatatttaaggtgtattcagatacgacggtatcatgcctggctgagaaagtaagggggatgacaaatagcatcgtggaaagaaatgaggtcaacatcttgaaaatcggcgtaaaaaaaatccgagaatgaaaacattctcggattttactcagtataagaatcgttcaacggatccttatactgattggcattacccccgaaggagtatttttacgttactggccaacaaagagattagtctttgctgttaccgaaacctgcgttaagcaattcagccaggttggcagttgcttcatccgcgctaacctgcggaacaacaggggtttcgccctgagctttacgacgcatgcgatcctgatgataagcgtaaccggtaccggctggaatcagacgaccaacgattacgttctctttcaggccacgcagttcatcacgtttaccggcaacggccgcttcggtaagaacacgcgtagtttcctggaacgatgctgcagagatgaaggactcggtcgccaaggatgccttggtgatacccagcaggtcacgagtgaacgtggcctcgattttgccttcagctgccaacttacggttagcgattttaacgcgagacatttctgcctgctcgccttccaggaagtcggtgccacctgcatcaacgatggtgcctttacgcagcatctgacgaacgataacttcgatgtgtttatcgttaatcttaacgccttgcagacggtaaacttcctgcacttcgttggtgatgtaacgggtcacggcgtgaacgccacgcagacgcagaatgtcgtgtggagattctgggccgtcggaaaccacgtcaccgcgttctacaacttcaccttcgaacacgttgagctgacgccacttaggaatcatctcttcgtatgcatcgctaccatccaacggtgaaatcaccagacgacgcttgcctttggtctctttaccgaacgagatgatcccgctgatttcagccaggattgcaggctctttcggacgacgtgcttcgaacaagtcagcaacacgtggcagaccaccggtaatatccttggtaccgctggattcctgcggaatacgcgccaaagtatcaccagcaccgatctgaataccgtcttccagctgaacaatcgctttacctggcaggaagtattgagcaggcatatcagtacctgggatcaatacatcgtcgcctttagcgtcaacgattttcagtgctggacgcaggtctttaccgctaccggtacgctctgcggagtccagaacgaccagagaagacaaaccggtcagttcgtcggtctggcgggtaatggtctggccgtcaatcatatccgcgaagcgaatgaaaccgctcacttcggtcacaactggcatgatgtgcggatcccagttggcaacggtctccccgccctggacttctgcgccatcgcctttgcccattacggcaccgtaaggcactttgtagctttctttagtacgaccgaattcgtcgatcagcttcagctcggtattacgagaagtaataaccagcttacctgctgcattcataacgaacttggcgttgctcagtttcagcgtacctttgttcttaacctgaatgctggattctgctgccgcacgagatgccgcaccaccgatgtggaacgtacgcatcgtaagctgggtacccggctcaccgatggactgtgctgcaataacacccactgcttcacctttgttgatgatgtggccacgcgccaggtcacgaccatagcagtttgcacacacaccgaaatcggtttcacagcttacaactgaacgaactttaacgctgtcgacggagttttcttctaacagatcacaccatttttcgtccaacagggtgttacgcggaaccagaatatcagccgtacccggcttcaagacttcttctgcagtcacacggcctagaacgcgatcgcgcagtggctctttaacatcaccaccttcgataaccggagtcatcacgataccgttatgggtaccacaatcgtcttcggttacaaccagatcctgtgccacgtcaactaaacgacgggtcaggtaaccggagttcgcagttttcaatgcggtatccgccaaacctttacgcgcaccgtgggttgagatgaagtactgaagtacgttcaaaccttcacggaagttcgcggtgattggcgtttcaatgatcgaaccatctggcttagccatcaggccacgcataccggccagctgacgaatctgtgctgcggaaccacgcgcaccggagtcggccatcataaagatgctgttgaaggaaacttgttgctccacttcacctttactgttgatgacgtcttccacggacaagttgtccatcatagccttggcaacacgttcgttggctgcggcccagatatcgatcactttgttataacgttcgcccgcggttaccagaccagattggaactgctcctgaatctcggcaacttcggtttcagcttcttcgatgatcccagctttcgcttcagggataaccatgtcatcgatacctacagaggcgcctgaacgcgctgcgtaagcaaaaccggtgtacatgatctggtcagcaaagataaccgttggcttcaagcctaggatgcggtaacaggtgttcagcatcttggagatagcttttttgcccagcggctggttaacgatagagtaaggcaggcctttcgggacaatcatccacaaaatggcacgaccgatagtcgtatcgatgatgctggtttgcgaaacggtttcaccttccgcagtacggatttcttcagaaatacgcactttaactcgggcgtgcagagacgccaggccagcgcgataaacacgctcagcttctttcgagccattcagcaccatgccttcgcctttggcgttaacacagtcacgggtcatgtagtacagacccaatacaacgtcctgagaaggaacgatgattggctcgccgttcgcaggtgacaggatgttgttggtagacatcatcaacgcacgcgcttccagctgagcttccagcgtcaagggtacgtgaactgccatctggtcaccatcgaagtcggcgttataagccgcacaaaccagcggatgcagctgaattgctttaccttcgatcagaaccggttcaaacgcctggatacccaaacggtgaagggtgggtgcacggttcagcagcactgggtgttcgcggataacttcatccagaatatcccaaacaaccgcttcttcacgctcaaccatcttcttggcagctttgatggtggtagcaagaccacgcagttccagcttaccgtagatgaacggtttgaacagctcgagtgccattttcttcggcagaccgcactgatgcagacgcaggtatggacctacggtgataaccgaacggcctgagtagtcaacacgtttacccagcaagttctgacggaaacgaccttgcttacctttgatcatgtctgccaaagatttcaacggacgcttgttcgagccggtaattgcacgaccgcgacggccgttatccagcaatgcgtctactgcttcttgcagcatacgcttttcgttacgcacgatgatgtcaggagcagccagatccagcaggcgtttcagacggttgttacggttgatcacgcgacgatacaaatcgttcagatcggaagtcgcaaagcgaccgccatccaaaggaaccaatggacgcagatctggcggcaacacaggcagcacggtcaggatcatccactctggcttgttgccagactgtacgaacgcttccagcagcttgatacgcttggtcagcttcttacgcttggtctcagaattcgtttcgttcagttcttcgcgcaggatttcgcattcggcttccagatccatgtttttcaacaaggcctggatcgcttctgcacccattttcgcgtcaaactcatcaccaaactcttccaacgcgtccagatactgctcttcagtcaggatctgacgacgttccaggttggtcatgccgccttcgataaccacataggattcgaagtacagaacacgttcgatgtcacgcagtggcatatccagcaacaaaccgatgcgcgaaggcaaggatttcaggaaccagatgtgtgcagtcggagaagccagctcgatgtgacccatacgctcacggcgtactttggtctgagtcacttcaacgccgcatttctcacagattacaccgcggtgtttcaaacgcttgtatttaccacacaagcattcgtaatcttttactgggccaaagatacgggcgcagaaaaggccgtcacgttctggtttgaacgtacggtagttaatggtttccggctttttaacttcgccgaacgaccaggaacggatcatgtctggcgaggccagagcaattttgatcgcatcaaactcttcggtcttagtttgcgctttcagaaactttaataagtctttcacggattggctcctgtcggagttagacctgataggcgcccaaacctaggtttgagcgcccctgtgaccagtgcgtaccaccagcagactcccggctgtgagagcctgccgtctggagaagatttactcttcttccagctcgatattgatgcccagcgagcggatttctttcaacaatacgttgaaggattccggcatgcctggttccatacggtgatcgccatccacgatgtttttatacatcttggtacggccgtttacatcgtcggacttgacggtaagcatttcctgcaaggtgtacgcggcgccataagcttccaacgcccacacttccatctcaccgaagcgctgaccaccgaactgagctttaccacccagcggctgctgagtaaccaagctgtaagaaccggtagaacgcgcatgcattttgtcatcaaccaagtggttcagtttcagcatgtacatgtagccgacagtaacctggcgctcgaactgctcaccggtacggccgtcaaacaaggtaatctgaccagaagttggcaggccacccagctttaacagttccttgatttcagtctctttcgcaccatcgaagactggtgttgcgattggcataccttttttcaggttctcagccagacgcataacttcgtcatcggtaaaggtgttcaaatcaactttctgacaaacgttgtcgcccagatcgtatgctttctggatgaactcacgcagtttggcaacgtcttcctgcttcttcagcatggcgttgatcttctcgccgatacctttagctgccatccccaagtgggtttccagaatctgaccgatgttcatacgcgaaggtacgcccagcgggttcagaacgatgtctaccggcgtaccgttttcatcgtaaggcatatcttcgatcgggttgatcttggagataacacctttgttaccgtgacgacctgccatcttgtcacccggttgaatctgacgtttaacggccagatacactttaacgattttcagcacgcccggtgccagatcatcgccttgggtgattttacgacgcttggcatccatcttcttctcgaattcggatttcatttcgtcgtactgctctgccagctgttccagctggttttgcttgtcttcgtcggtcaggcccagttccaaccagcggtcacgtggcagtttgctcagcttgtcagcttcgataccaccagaaaccagcacggcgtggatacgtgcaaacaggccagcttccagaatctgcaattcttcagtcaggtctttcttagcctgcttcagctgcatttcttcgatttccaacgcgcgcttgtctttttctacgccatcgcgagtaaagacttgcacgtcgataaccgtaccggaaacgccgtttggtacacgcagagaagagtctttaacatcagacgctttctcaccgaagatcgcacgtaacagcttctcttctggagtcagctgggtttcacctttaggtgttaccttaccaaccagaatgtcgccgccggtgacttcagcaccgatatacacgataccggattcatccagtttggagagcgcagcttcacccacgttagggatgtcggcagtgatctcttcaggccccagcttggtgtcacgagacacacatgccaattcctgaatatggatagtggtgaagcgatcttcttgaaccacacgctcggagaccaagatggagtcttcgaagttgtaaccgttccaaggcatgaaggctacgcgcatgttctgacccagcgccagctcacccaggtctgttgatgggccatctgccagcacgtcgccgcgctcgattggctcaccgagattcacacacggcatctggttgatacaggtgttctggttggaacgggtgtacttagtcaggttataaatatcaatacctgcttcgcctgggtacatctcgtcttcgttaactttaatgacgatacgggatgcatctacgtactgaacggtaccgccacgtttggctacggaggttaccccggagtcaaccgctacagcacgttccataccggtaccaaccagcggcttatcagcacgcagagtaggaaccgcctgacgttgcatgttcgcacccatcaaggcgcggttggcgtcatcgtgttctaggaatggaatcagagaagcaccaacggacaccacctgctgagtggaaacgtccatatagtcaacctgatcgcggctaaacaggctggattcgcctttgctacgacaagtgactaagtcttcgatgaagcggccgtcttcgtccaggttggagttcgcctgagcgataacgaagttgccttcttcaatagcagacagatagttgatttcatcagtcaccacaccgtcacgcacgcgacgatacggagtttccaggaaaccatactcattggtctgtgcgtacacggacaaggagttgatcagaccgatgtttggaccttctggcgtttcgattggacatacacgaccgtagtgagtcggatgaacgtctcgaacttcaaagccagcacgctcacgggtcaaaccgcccgggcccaatgcagaaatacgacgcttatgcgtgatttcagacaacgggttgttctggtccataaattgggacagctggctggaaccgaagaactctttcaccgccgccgaaataggcttggcgttgatcatgtcctgaggcatcagcgtgtcgaggtcgccaagagacaaacgctctttaacagcacgctcaacgcgaaccagacctacacggaactggttttcagccatttcaccaacggaacgaatacgacggttgcctaagtggtcgatatcatccacttcgcctttaccgttacggatatcgatgagcttcttcatcacttcagtgatgtcttctttgctcaggataccggaaccttcgatctcgtcacgcagcagtgaacggttgaacttcatccggccaaccgcagacagatcgtagcggtcttcagagaagaacaggttctcaaacagattttcagctgcttcgcgagttggtggctcaccaggacgcatcatgcgatagatctcaaccagagcgcttaagcgatcgctggttgggtcaacgcgcagggtctcggagatataagcaccgtgatccaggtcattggtgaacagagtttcaatgcgtttgtgaccagcctggctcagtttcgccagcagatccagtgacagctccatgttggctgcacagatcagttcgccagtgttctcatcgatatagtctttagcgaccactttaccggcaatgtattcaaccggaacttcgatgcgatccacaccgtctttttcaagctgacggatatgacgagcggtaatacggcgagctttctcgacataaaccttgccattagcttcgatgtcaaaggaagctgtttcaccgcgcagacgctctggaaccagctccatctgcagcttgttatcacgaatttcgaacacaactttatcaaagaacaggtcaaggatctgttcagtggtaaagttcaatgcacgcagaatgatggtcgcaggtaatttacggcgacggtcaatacgcacaaagaggttatctttcgggtcaaactcgaaatctaaccatgaaccgcgataagggataatacgtgcgttatacagcactttacccgatgaatgggttttacccttatcactgtcaaagaatacaccaggactacggtgaagctgagatacgataaccctctcagtaccgttaatcacaaaggtaccattctcggtcatgagtggaatttcacccatgtagacttcttgttccttgatgtctttaaccgtaccttcaggagcttcccgctcatagataaccagacgcagcttaacgcgcagcggtgctgaatacgtcacgccacggatctggcactctttgacgtcaaacactggctcaccaagacggtagctaacgtattgcagctccgaattgccactgtagctctggattggaaaaacagaacggaatgccgcttctaggccgtgctgtccttctggatcttgctcgataaatttctggaacgagtcaagttggatagaaaggagataaggtatgtccaaaacttgtggacgtttaccaaaatccttacgaatacgttttttctcggtataggagtaaaccatagggttcctcagctcgctgatcagtgacccactctgtccgtcctaaaggacagttcattcaacactattttctcgatcggaaagtcgaaacactttccgtaatacctcgttctatcactcttaaaccatttcatcgcgttaccttgactaccgagctacccgagtgggtcgtagctgagaacgcagtatattaagtcgtcgatagaaagaaatattggggttagtcagtatctaaacagtgtgaaactccactgacgccctacagcgcaaaaaggctggtgactaaaagtcaccagccatcagcctataacttaggctgcacagttgaaattaaatttatttaatttcaacttctgcaccagcttcttccagtgcttttttcagtgcttcagcgtcgtctttgctcacgccttctttcagagcagctggcgctgactcagtcagatctttagcttctttcaagcccaggccagttgcgccacgtacagctttgattaccgcaactttgttagcgccgattgctttcaagataacgtcgaattcagttttctcttctacaacttcagcagcagcagcaggacctgcagcaacagcagcagctgaaacgccgaatttctcttccatagcggagatcagttcaacgatttccattacagacagagctgcaacgccttccagaatttggtctttagtgatagttgacataacaagtgttcctaaaatacagaaatagtttatacgttaaaaagcagtgtcggaaaaaacagagggcgattaagccgcttcagcttctttctgatcacgcagcgcagccaaagtgcgaaccaatttgccagcagcggcttctttcatggttcccatcagacgtgcgattgcttcttcgtaggtcggcagagttgccaggcggtcgatttgagccgcagggattaactcgccttcaaaggctgctgctttaacctcgaattttgcattcgctttcgcgaaatctttgaacaaacgagcagctgcgcccgggtgttcactagaaaatgcaatcaaggttggaccaacaaacgtgtctttcaggcactcgaatggagtaccttcaactgcgcgtgacagcaaggtgttacgaacaacttgcatgtgaacgccagcttcacgacctgctttacgcagttcagtcattttatcaacggttacgccacgggaatccgcaacaaccgcagacagcgcacctttggctacttctttaacttcagcaacaatcgcttgtttgccttgaagatttagtgccattagttcttgctcctggattaaccggagaataattccccggaactcacatcacccaattacgacaacaatgtcattaacgggcgttgaaacacggtgagcagaatccagcaaagacaattctttaattaaaaagaaaaaatttctttaggctctgtcaccgtctacgcaggaaattaagtcctttgcagaacacctgcggtcttggacggaggcttggataggccaagctccaaccgaaaaattctgttgttcacatggtacggttaaaccgtagtcaatagaaccatgggcgtaagattctagacaaacctaacgcccacgtaaagcgataaaagcaaatagtgattagttcactactgcagtcaggccgctttgatcaatagcaacgccggcgcccatggtggtggacaggctgattttcttgatgtaaacgcctttcgctgtagcaggcttagccttcttcagcgcaactaccagggattccaagttttctttcagcttgtcagcgtcaaagtcaactttaccgatggtagtgtggataataccgtttttgtcgttgcgataacgaacctgacctgctttagcattcttaactgcttcagcaacgttaggagtaacggtacccactttcgggtttggcatcaggccacgtgggcccaagatttggcccaattgaccaacaacgcgcattgcatctggagatgcgattacgacgtcgaagttcatttcgcctttcttgatttgatcagccaggtcgtccatacctaccagctcagcaccagcttcttttgctgcttcggcgttggcgccttgagcaaatacagcgacgcgaacagaacggccggtaccgtgtggcaatacagttgcgccacggacgttttgatcagatttacgagcgtcgataccgaggttaacggcaacgtcaacgctttctacgaatttagcagtagccagctctttcagcagggcaacagcttcgttgatatcgtattgcttagtcacatcaactttgtcacggatcacgcgcatgcgcttggtcagcttagccatttattaaccctccactaccaggcccatggaacgagcagtaccttcgatagaacgcatcatagcgtctacgtcagcaccagtcatatccgcagctttggtttctgcgatttcacggacctgagcaacggtcactttacctactttgtctttgttcggcttgccggaaccagacttaatacctgccgcttttttcagcagaactgctgctggcggggttttagtaacgaaagtgaaagagcgatcagaataaacagtaataacaacagggatcggcaggcctttctcaatgctttcagtcttagcattgaacgctttacagaattccatgatgttaacaccctgctgacccagtgctgggccaaccggaggacttgggttcgccataccagctgctacttgcagcttgacataggcttgtactttcttagccatttacgatttcctcgatttgggtagtatcgcctcgttgtgaggctccccgtgttttgcctcgcaaagtcggaagactgagccagacatctaaaaacaaaaggcgcgaaattatagtgtaatttcacgcctgatacaagactcaaagttcaaccggtggtgaaaattgaatcagcctttctcgacctggctgaagtccagctcgaccggtgttgcacggccaaagatggaaacagacactttcaagcggctcttttcgtagtccacttcttcaacaacgccgttgaagtctgcgaacggaccatcgctaacgcggaccagttcacctggttcgaacagtgttttaggacgtggtttatcacccacttgttgaagacgattcattatcgcatcaacttctttatcactgatcggcgcagggcgatcggaagtaccaccgataaagcccatcacacgcggtacgctacgcactaagtgccagcttgcgtcattcatgaccatctggaccagaacgtagcctgggaagaacttgcgttcactcttacgacgcaggccgccacgaatttccacgacttcttccgtcggaaccatgacttcgccgaatagctcttccatgccctgtaatttgatatgctcacgcagcgattgagctacgcggccttcaaaaccggaaaacgcctgaacgacgtaccaacgcttttttggtgcttcagacatcttagaacctcaggccagtaataaacgatactaagcgaaccaggataccatccagtccccacaaaatcagtgacatcacggcagtaaccgcggcaacgattaacgtggtgtgtagcgtttcctggcgagtaggccaaatcactttacgcacttccgtgcgtgcttcgcgagcaaacgctactgtggctttgcctttaaccgtcatcagcgcaacagcaccggcaacagcgataattacaacaactgccagcgcgcgcagtggaagactgaaatctcggtaataataattgccaacaattgccgcaaccaataagacggcaacaactagccatttaaccgcttccaggccgcgcccgctcccttgagcctcggtattcgcactcataaaccaacctgtcactatgattcagaacaaacaactttgcctcgcgtagcgaagcaaaccaaaccgaaagatgctctagatttccggcaccattcagcactatccgccgtactgacagagcccatctcaccaataattatgagtctaaaaccactgatgagataggttctggtgtcacaacgtagaaaaagggcatcaaatgatgcccttttaccgcatgtcgcgtcaaatcttattcaataactttagcgacaacgccagcacctacagtacgaccaccttcacggattgcgaaacgcaggccgtcgtccatagcgattggcgcaatcaggtttacaatcatttgaatgttatcacctggcattaccatttccacgccttctggcagttcaatggtaccggtcacgtcagtagtacggaagtagaactgaggacggtaacctttgaagaatggcgtatgacgcccaccttcatctttgctcagaatataaacttctgattcaaacttggtgtgtggcttgatagaacctggcttagccagaacctgcccacgctgtacgtcatcacgtttagtaccacgcagcagaacgccaacgttttcaccggcacggccttcgtccagcagcttgcggaacatttcaacgccggtgcacgtggttttgatggtatcgatgataccaacgatctcaacttcttcacccactctgacgataccgcgctcaacacgaccggtaacaacggtaccacggccagaaatagagaacacatcttcaattggcagcaggaacggcttatcaattgcacgctcaggctgtggaatgtagctgtccagtgcttcagccagttcaataattttggcttcccactctggttcgccttccaacgctctcagcgcggaaccacgaataaccggagtgtcatcgcctgggaaatcgtattgagacagaagctcacgcacttccatctcaaccaattccagcaattcttcatcatcaaccatgtcacatttgttcaggaagacgagaatgtaaggaacgcccacctgacgacccagcaggatgtgctcgcgagtttgtggcattgggccatcggtcgcagcaacaaccagaatcgcaccgtccatctgagcagcaccggtgatcatgtttttcacatagtcagcatggcctgggcaatcaacgtgcgcataatggcgagacggggtgtcatattcaacgtgcgaagtattgatggtgatgccacgcgccttttcttctggcgcgttatcgatctggtcaaacgcacgggcattaccaccgtaagttttggccagtacgctggtgattgcagcagtcagggtagttttaccgtggtcaacgtggccgatagtacccacgtttacgtgcggttttgtacgttcaaacttttctttagacatcgattgtccctctaagacacggaatcggtggtttcaccacatcaaccaagcaaaatgcttgctgaatccatagcgcagaaagaagatcaagggagcgagagaaagaagaagtggtgctgataggcagattcgaactgccgacctcacccttaccaagggtgcgctctaccaactgagctatatcagcacatcttggagcgggcagcgggaatcgaacccgcatcatcagcttggaaggctgaggtaatagccattatacgatgcccgcatcctggaactcggctacctgacttatctgcagaatctaaaaggaagggcgtggcctcttcactcttggaaggttttcaccttccctttacttgccaggcaggttttcattttcctgaatcaccttggcacataaagttgaatatggtggtggaataaggattattcatcacttcgttcctcacccttcgggccgccgctttgcgttgttgtcttgcttcgctcggctcgaactttgtcgaaggttttcaccttcccctcaagcgcttatctcgattcattacttcgaatcacctaaggctcaaggttaaatatggtggtgggggaaggattcgaaccttcgaagtcgatgacggcagatttacagtctgctccctttggccgctcgggaaccccacctaattgtaagtacttgaatggtgccggcaccaagagtcgaactcgggacctactgattacaagtcagttgctctaccaactgagctatgccggcatcaagtgcagcgcattctaggtagaccagacttgcgatgcaacaaaaaaatcgcttaattcgctctatcgctcataaaataaacagatttgcgcgctgtgacgtattatccagcaatgtacgttcaaatattattcgtaacggcttaacttgtcacccttgaattgccgattttaaaaacagatcacaacggaccattcgcaccaatttgtgtcacgcagcctcattcaagtgcatacaaagtatcagattaaaataaatacccataagccgcggtaagttcgcattggcgtaattcttgctttctcagcatcaatacattggttttttctgtttatcgtccaatgcttacttaccaatgaggtatacccaatgaaaatcgttttgttaaacgcagcgactctacctatttatcgcaatgaattggcgcttctattgattgatgcggtcacccatggcgcatctattggttatagctctcaacatttaccagctgaagaagcagaacagtattttcatagcttgcgtcctgccattgccaccagagagttaatgctgtggattgcccgtgatgaatcaggcgttattggcactgtccaactaagtttatgccagaaggacaacggtcttaatcgagcagaagtgcagaagcttttggtacacagtcgctgccggcgagtgggcattggacaaaaattgatgcatgaggttgaagaaacggcataccaacttcaccgcggtttgctttatctagatacgcaaacaggttcatctgctgaatcattttataaagcgcagggataccgttgcataggtgaaatccctgactatgcctgtacaccaagcggtagctaccacccaacgtcgatttattacaagcggctatttgcggcaaatcagtcatatagttcaattgtcggccaaattgcgcatcccagtggggtgaaaaatatccacggtgccataaacagtcttaattgatcggaataccaacatacgtcaaagaaatcgctcgccacgaacaaaaaactctacgccaaaaaccaagctgcctataatatgcagcttgtttcttatctggagttggcgtccagcgcctttcccaacctgcgtttacaggcagaatttggcttatgacaaaaagagagcaatctttagcgacgccttacctacagttcgatcgcacacagtgggcggccctacgcgactcagtgcctttgacgctgacagaagaagaaatcgttaatcttaaagggataaacgaagacctctcattggaagaagtggcacagatctacctacccttgtcccgtctcctcaatttctatatcagttctaatttgcgtcgtcaggcggtattagagcagtttttaggaaccgatgggcaacgtattccttatattattggtatcgcaggtagcgttgccgtcggcaaaagcacaacggcgcgtctgttgcaggcattgctaagccgttggccagagcatcgcagcgttgaactgatcaccactgatggtttccttcacccaaataaagtattaaatgaacgcgggttaatgaagaagaaaggtttcccgcaatcttatgatatgcataatttggtgaaattcgtttccgaggttaagtctggagccagcgaggttacagctcccgtctattctcatctgatttatgatgttgtccctgatggaaataaaactattaagcaacctgacattcttattttagaaggtctgaatgtgttgcagagcggcatggattatccacacgatcctcatcatgtatttgtttctgacttcgtcgatttctcaatatatgtcgatgcgccagaggaattactgcaaaactggtatataaaccgttttcttaaattccgacaaggtgcattctctaaccctaattcttatttccataactatgcacagttgcctgaaaccgaggctatcaagattgccactcagctttggaaagagattaacggactgaatttaaagcaaaatatactaccaacgcgtgagcgcgccagtttaataatgactaaaagcgctaaccacgcagtagaaagcgtccggttgagaaaataaatttaatagggaggctaagtctccctatttattatggattaactccgcgaagagatatttctccaccgatgtaaggcttcacatcaccgtcttgttccagcaataaaccgccttgctgatctattcctctggcaatgccgaatatctcttggttaccgataatcaatttaactggccggtctaaataattatccaactctcgccaacgagaaataaatgcccctaaaccttcattttcgaacttaataaccgcgcgacgtaattcactcaataactcagcggtgagtttattgcgatcgatagaaacgccggcctcttgtaaattaatccaatcctggctaataacgttattcgatgattctcgcatcgataaattaattccggcgccaataactaactgggcagcgtccccggtttttcctgttaactcaactaatataccggctaattttttatcgtttaagtataagtcgttgggccatttgaccttcacatccgccgcacctagctttctcaatacttcggccatcacaatgccgactaccagacttaaccccattgcggcagcgggtccctgctctaggcgccaaaacatggagagataaaggttagccccaaatggtgaaacccaatgacgcccacgtcgccctcttccggcctgctgatattcggccacacaggcatcgcctgactggagttcattaattcgatcaagaagatattggtttgtcgaatcaacgaccggcaaaacactgactttcccttcgggtaaataagtggctatcgcatctgcattcagcaactgaataggttcaggcaggctgtaacctttccccggaacggtaaatacatccaaaccccattcgcgaatggtctgaacatgtttattaattgcggcgcggctcatgcccagagtttcccccagttgctcacccgaatggaatgcgccatcagctaacatgccaatcagtcttaaaggaacggtagtatctttcacgacaagctctccacggcattaacttcgcccgaagccgcaataaaacgcacttcaggttcgagccaaacggcaaatttaagcgcaacctgttggcgtacatggctggcgagatcgacgatatcctggcttgatgcatcatccaggttaataagaaccagagcttgctgctgatgcaccgcagcgccgccaattcggtgtcctttcaatgaacattggtcaatcaaccaaccggcagcaagttttaccgagttatcagcctgaggataatgtggagcagtaggataggttcggagtatttccgcggccttttctgcgctgactataggatttttgaagaaactacctgcattacccgtcacattaggatctggcagtttactccgccgcattgcgcataccgagtcaaaaatctcacgagcagtgaccgtcgacggatttaaacgagttaaatcaccgtaacctagggtaggcttccagtccttattcagcttgatgccgacagcaacaatggcaaagccttcaccatagcgatgcttgaaaatgctatctctatagccaaaagcacagtcttcagccaaaaggcgtcgaacttcgccagtattcaaatcgagcaaatcgacgtattcacagactttttgtagctcgacaccgtaagcaccaatattttgaatcggtgcggagccaacgcatcccggaattaacgccagattttctaaccctgccatttgctgctgtaatgaatagcacacaagttgatgccagttttcacccgcgccaacgtgcagataccatgcggtatcatcttctctacactgaatgcccttaatcctatttaacagtaccgtaccggagaagtcttcaataaacagtacgttacttcctttccctaatagcaacactggctgatttgacgctttagcttcattccaggcagcagttagcgcagaaacagactctacgctcaccacctgggttgcatatgcggaaagagcaaaggtattaaggtttttcaggggcgcggcaggggtcaacatagcttgtaatactcactctaactaaactgtatctagtctaaccgatcggaatactcaggttgtaacttgtttacatcagagggtgaaaaatatatttatttaattaatagcctaatagatagagctgaaaaatggatgcttttcgcccaatttgagttctgcgatctggtagctttgctgattttacatccgaaaatacccattaatgaggatgagtttccgataaaaccgacctggttcgttggttacatggctttttaataaaatataagcccggtgagtgactgtatctgcctgaaaatgctgcgaatttactgcctgaaaacgtcaacggcggcgcaatttaccggataagccgccccttatggaatgaaaatcgccatatacgccttcaacgcccgacattcccgggggttcccatgcccttaaacgcaaaaagccccccgcaatcgcaggaggctcggttcgagggcggcaatgacttttatccgcctcgcgtctgtcttttttccatagcaaaaaccccacgcttttggcatggggtcttggcttgatttgatgcctggcagtgtcctactctcgcatggggagaccccacactaccatcggcgctacggcgtttcacttctgagttcggcatgggatcaggtgggaccaccgcgctattgccgccaggcaaattctgtttcaatcaacccgccacgtgatttacaccacacagccagtcaatccaatctgttaacaatgctgaaaatcaaaacgctctctaaaacaccttcggtgttgtaaggttaagcctcacggatcattagtactggttagctcaatgcatcgctgcacttacacacccagcctatcaacgtcatagtctttaacgttccttcagggggcatgaagccccagggaagactcatcttgaggcaagtttcgcgcttagatgctttcagcgcttatcttttccgcatttagctaccgggcaatgccattggcatgacaacccgaacaccagtgatgcgtccactccggtcctctcgtactaggagcagcccctctcaatcttccaacgcccacggcagatagggaccgaactgtctcacgacgttctaaacccagctcgcgtaccactttaaatggcgaacagccatacccttgggacctacttcagccccaggatgtgatgagccgacatcgaggtgccaaacaccgccgtcgatatgaactcttgggcggtatcagcctgttatccccggagtaccttttatccgttgagcgatggcccttccattcagaaccaccggatcactaagacctactttcgtacctgctcgagccgtcactctcgcagtcaagctagcttatgcctttgcactaacctcacgatgtccgaccgtgattagctaaccttcgtgctcctccgttactctttgggaggagaccgccccagtcaaactacccaccagacactgtcctcaccccagattatggggccgagttagaacatcaaacattaaagggtggtatttcaaggttggctccacgcagactggcgtccacgcttcgatgcctcccacctatcctacacatcaaggctcaatgttcagtgtcaagctatagtaaaggttcacggggtctttccgtcttgccgcgggtacactgcatcttcacagcgagttcaatttcactgagtctcgggtggagacagcctggccatcattacgccattcgtgcaggtcggaacttacccgacaaggaatttcgctaccttaggaccgttatagttacggccgccgtttactggggcttcgatcaagagcttcgccttgcggctgaccccatcaattaaccttccagcaccgggcaggcgtcacaccgtatacgtccactttcgtgtttgcacagtgctgtgtttttattaaacagttgcagccagctggtatctgcgactggcttcagctccgagagcaagtctcttcacctagcgccagcgtgccttctcccgaagttacggcaccattttgcctagttccttcacccgagttctctcaagcgcctgagtattctctacctgaccacctgtgtcggtttggggtacgattcaatgttacctgatgcttagaggcttttcctggaagcttggcatcaactacttctgcaccgtggtgcatcgtcatcacgcctcagggttgatggttttccggatttaccaggaacacccccctacacgcttaaaccgggacaaccgtcgcccggctagcctagccttctccgtccccccttcgcagtaacaccaagtacaggaatattaacctgtttcccatcgactacgcttttcagcctcgccttaggggtcgactcaccctgccccgattaacgttggacaggaacccttggtcttccggcgtgcgggtttttcacccgcattatcgttacttatgtcagcattcgcacttctgatacctccagcagtcctcacagactaccttcaacggcttacagaacgctcccctacccaacaacacctaagtgtcgttgccgcagcttcggtgcatggtttagccccgttacatcttccgcgcaggccgactcgaccagtgagctattacgctttctttaaatgatggctgcttctaagccaacatcctggctgtctatgccttcccacatcgtttcccacttaaccatgactttgggaccttagctggcggtctgggttgtttccctcttcacgacggacgttagcacccgccgtgtgtctcccgtgataacattcttcggtattcggagtttgcatcggtttggtaatccgggatggacccctagccgaaacagtgctctacccccgaagatgagttcacgaggcgctacctaaatagctttcggggagaaccagctatctcccggtttgattggcctttcacccccagccacaagtcatccgctaatttttcaacattagtcggttcggtcctccagttagtgttacccaaccttcaacctgcccatggctagatcaccgggtttcgggtctataccttgcaactagacgcccagttaagactcggtttccctacggctcccctatacggttaaccttgctacaaaatataagtcgctgacccattatacaaaaggtacgcagtcacaccacgaaggtgctcccactgcttgtacgtacacggtttcaggttctatttcactcccctcgccggggttcttttcgcctttccctcacggtactggttcactatcggtcagtcaggagtatttagccttggaggatggtccccccatattcagacaggatgtcacgtgtcccgccctactcatcgagttcacagcatgtgcatttttgtgtacgggactatcaccctgtaccgtgcgactttccagacgcttccactaacacacaaactgattcagactctgggctcctccccgttcgctcgccgctactaggggaatctcggttgatttcttttcctcggggtacttagatgtttcagttcccccggttcgcctcgttagactatgtattcatctaacgatagtgcaacgaattgcactgggtttccccattcgggtatcgtcggttgtaacgcttcatatcagcttaccgacgcttttcgcagattagcacgcccttcatcgcctctgactgcctaggcatccaccgtgtacgcttagtcgcttaacctcacaacccgaaggtgtctttcgacatcatcgtgctgcgattattgagagactctacctgcagatgactccttgtctcggtaaatctacggagagacaagttttagctgcagtgtttcaattttcagcttgttccagattgttaaagagcaatatcttaaacacgactcgttaaagtcatctttaagatattcagttgataatgtctttcactcattatcggatggcgtccccaaggggattcgaacccctgttaccgccgtgaaagggcggtgtcctaggcctctagacgatggggacacaggaaattccgactaaatcaaaaacttaatcgtttctcgtgtcatcatgagtcgaaactcacgacatcaacaggtgctcttgctcattactattatcagacaatctgtgtggacacggcgcaatgcgtatcattaggtaaggaggtgatccaaccgcaggttcccccacggttaccttgttacgacttcaccccagtcatgaatcacaaagtggtaagcgccctcccgaaggttaagctacctacttcttttgcaacccactccccatggtgtgacgggcggtgtgtacaaggcccgggaacgtattcaccgtagcattctgatctacgattactagcgattccgacttcatggagtcgagttgcagactccaatccggactacgacagactttatgtggtccgcttgctctcgcgagttcgcttcactttgtatctgccattgtagcacgtgtgtagccctactcgtaagggccatgatgacttgacgtcatccccaccttcctccggtttatcaccggcagtctcccttgagttcccaccatgacgtgctggcaacaaaggataagggttgcgctcgttgcgggacttaacccaacatttcacaacacgagctgacgacagccatgcagcacctgtctcacagttcccgaaggcaccgaagcatctctgctacgttctgtggatgtcaagagtaggtaaggttcttcgcgttgcatcgaattaaaccacatgctccaccgcttgtgcgggcccccgtcaattcatttgagttttaaccttgcggccgtactccccaggcggtcgacttaacgcgttagctccggaagccacgcctcaagggcacaacctccaagtcgacatcgtttacagcgtggactaccagggtatctaatcctgtttgctccccacgctttcgcacctgagcgtcagtctttgtccagggggccgccttcgccaccggtattcctccagatctctacgcatttcaccgctacacctggaattctacccccctctacaagactctagcttgccagtttcaaatgcagttcccaagttaagctcggggatttcacatctgacttaacaaaccgcctgcgtgcgctttacgcccagtaattccgattaacgcttgcaccctccgtattaccgcggctgctggcacggagttagccggtgcttcttctgcgagtaacgtcaatcacttcacgtattaggtgaaatgccttcctcctcgctgaaagtgctttacaacctgaaggccttcttcacacacgcggtatggctgcatcaggcttgcgcccattgtgcaatattccccactgctgcctcccgtaggagtctggaccgtgtctcagttccagtgtggctggtcatcctctcagaccagctagggatcgtcgcctaggtgagccattacctcacctactagctaatcccatctgggcacatccgatggcgtgaggccctaaggtcccccactttgctcttgcgaggttatgcggtattagctaccgtttccagtagttatccccctccatcaggcagtttcccagacattactcacccgtccgccgctcgccggcaaagtagcaagctactttccgctgccgctcgacttgcatgtgttaggcctgccgccagcgttcaatctgagccatgatcaaactcttcaatttaagatttgtttgatttgctaccgaagtagcgatgctcaaagattactttctgcaaatatgcattcgaaccgaagttcaaatgtttactgctttggtcactcttcaagacttgatatttcttctgcctgccgaaacaggctttgatatcgtcttgcgagtgcccacacagattgtctgataaattgttaaagagcgttcgttacccgttcgcttgtggcgaatcttacggtaacgcgggaggcagataatacgctttcccgctgaagtgtcaagcttttcttttcaactttcgttttaagaaccggcgtttccgcctgcttaacacttcctgacccggcgaagtttgtttcgttgttcccggtcagtggaggcgcattatagggagttcctgacaggctgcaacccctaatttcaaataattttccaaccggcttttttttcaacgaattgcggcgagaatcatcatttttgctattttttatactgcatttgcgagaattcacgggcgaaactgcttacctgctgccaatcggtgtattccacttctttactggtatctgtttctccgccggtcatgcgcataataagttgaatcatgacccgatcaaaccagcgatagcgtggataacgcagcgctccagcgaagacgccgcagagtgtcggctgccaaggcgagcttgccaggaacttacgcacataagaattggtttggggcgtgcgcttctccggtttgcgcgccgtcaggttcacggcaaagaaagcgctcggcatagtattcaattgttccaggtgttgggtgatgaacttcgtcagcactttatcgaagtgcccataacgaatagaagctccgatcatgacctgttggtactgcccgagatcgatattccctactaatgccagatcctgtacgtcacaattgaccatcgcggataattcattagccatataagaagaaatagcctgagtttgcccatcacggctggagtaaagtatcaatgccttcataactactttttcctaattcaaagttactcgcgccagaatgttggcgtaaacagtaccagtagggtgaatacttccaatcgaccaaacaacatggttatcaccagtatccatttagctgcggcattcattgaggtgaagttatctgctaccacccccaagcccggcccaaggttattcagcgtcgcagtgacggcagcaaaagcagaaaactcatccacaccggtagcaatgatcgccaacatactaatgatgaacaccagtgcgtaagcagagaagaatccccagaccgcttccagaatacgttccggtagcgcacgacgccccagtttgatggtgtaaaccgcgttcgggtgaaccaaccgctttaattctcgcgaaccctgcagatacagtaaaaggatacgaatcactttaaggccaccgccggttgaacctgcacaaccgccgataaaagcggaacataatagaaggataggaaggaatagcggccatttggcaatgctatcggtagtaaagcccgcggtcgtggccatagataccacttggaaaaacgcctgattcagagtttccagaccggatttgtacacgctgtgctgccacaaaaccaaagtacaaacgactaccagcgtcagttgtacaaagataaacatccggaattcgggatcgcgccaatacactttcaggctgcgcccgctcagtacggcaaagtgcaggccgaagttacaccccgagatcagcaagaagatggcaatgatagtgttaatcgttgggctggcgaaataaccgatactggcgtcatgagttgagaaaccgccaatagctatagttgagaaactatgcgaaatcgcatcgaacaccgacatccccgccccccacagggaaagcgcgcaggcaatggtgaggagcacataaataagccacagggtttttgccgtttccgcaattcgcggtcgcattttattatctttcaacggccccggcatttctgcccgatacagctgcattcccccgacgcccaatatgggcaaaatcgctacggccaacacgatgattcccattccccccagccattgcagcatttgccgatagaacagaatggccttgggtaaagaatccaacccgaccagcgtagtagcgccggtcgttgtcaggccggaaaacgattcgaaaaaggcatcggtaaccgaaaggttgggtcgctcagaaaaaagaaacggcaaagccccgacgctgcccagcaccgtccagaacagaaccacaatcaaaaagccctcgcgaggcttcagttcatgtttctgtttacggttgggaagccagagaaacaggccaatcaccagggcaacaaagaaggtttgactgaaggcacgaccggcaccatcacgatagatcaacgccaccagtccgggaataaacatagttccggagaataagatgaccagcagaccaacaatacgggttatggcacgaaaatgcattccggcacgttccttagcaattcattggatggggattattgcgaaatgggcgtcaattgcaacgaaccacgactcagatcgcgtaatttctccccgacctgactggcctgagtcgccggtaaagagagacggagattgacctgcgcgccataattaccctgtaaaatctgaccatcaacctgttgtagcagtgattccaccatcgccaactgcgcgtaatcacataacaaagtatattccacctgcggcactttatactttacttcgatttgtttcagcgcttgctgcactccgctgccgtaggctttgaccagcccgccggtgcccagttttatgccgccgtagtagcgaacgaccactgcggttatttcaccgatatgactccccatcagctgtgccagtatgggtttacccgcggttcccgatggctcgccgtcgtccgaaaaccctagctgctgagaatctgtcggtgcgccagcgacaaaagcccagcaatgatgccgggccgttgggtgctcttcttttatctgctgaataaatgctttggcttcattcactccgttggtatgtgccagcagagtgataaaacgacttttcttgatttcttcagtgacgctgacggaagccgccggaataagaaaaggctgcattaagccagattcagatcgcgcgtcatattctcaacccgcttttcatggataacgatattgtcttcaatacggatgccgccataaggtttcatcgcatcaatacgttcccaattaaaatgcttgctgaactcgccgctacgccaaggtgccaatagtgactcaatgaagtagatacccggctcgatggttaataccatgcgcggttcgagaattcgggtgcaacgcagatacggatacttcgacggtgcagccagatggctacctgtatcatcctgcataaaaccagccgaatcatgtacctgtagacctaacggatgacccaagccgtgtggcaggaatgggcaggtcaaaccttgttcgaccatcgcttcttcactgatatccaccactaatttatgggtgcgtaacagtttggccaaacgttgatgcatttgcagatggtaatcggtatagcgcacgccgcttttaatggtgccaatcagcgccagttgttcggcattcagatctttgattaacgccgcaaaatcgcttttgccgttcgccgcataggttcgggtcaaatctgccgcatagccgttgtattccgcgccagcatccatcaaaaaactgcgcatttcggccggtggttgatgctgcaatttggtgtaatgcagcaccgcagcatgctcgttcagcgcaacgatgttgtcataagggacatcggtatcgcgatgaccggtagccatcagataggccagattgatatcaaactcgctcatgccagacagaaaagcttcgtgagcggcgcgatgcccaactaccgcagttttttgcgcttcacgcatacaagcaagttcatagtcggttttatacgaacgatgatagtggaggtaatccaacaccggcttcggattgatattttccatcgagatacccaagccacgagcacgctcctgcgcatagccaatataggcaactcgttgacgctgttgtggtaataaaccagcgatatcatccgctttagttaacgggaatatttcgatggatttggtccagaagctatcaggcaaaggttccacgcagtgccagtaatccaccggtgaatagaaccataattttggcgtattaacaccatcgacccataaccagcagttcggtacttcagtcaccggcacccaagctttaaactgcgcgtttgccttaaacggataatcgcggtcatcaaggaaaatgcgctgcaactccccggaatgaatcagtaaagcatcaagctgattgcgctctaatacttcacgcgtgcgttgctgtagcgtggataaatgttcgttatataaagaagccagcgtttccatcaaagtaccctttgccattagaacttcaggttttttatcttatcacagtcatcggagccgtgttttatctacgcttaaccgtgggattgcccactaaatccttaataatcattacttatagctagattcgcggggaaaaatctcgtggaaattacgtcattatattatcgatgacagcaggatatcgttcaaacttagctgccaatgaaataattaaccagcatataaaacaacaataaatattatatatatcaatgtattcaccaaacctttgtgatccttgctgcaaaaaaacaaactcttatttgcatttatttaacaaaaaaaccacacttcctgaatatctggtcataccagatcacatgcgcttattcaggagatagatatgctctaccaaagcgaaacgctacagctgcactggcttgaaaacggtattgccgagttggtgttcgatgcacctggctctgtcaataaactagataccaaaaccgtggccagtttaggggaagccctaggcgtgctggaaaaacaaactgaactcaaagggttgctgctacgttccaataaagcagcctttattgtcggtgcggatatcaccgaatttctctctctgtttaatgccccgccggaaaaactgcatgaatggctggtttttgccaacaacacctttaaccgactggaagacttgccggttccgacgctgtccgcgatcacaggctatgcgttaggcggtggctgcgagtgcgtgttagccactgattttcgtatcgcttccccagaggctcgcatcggtttgcctgaaaccaaactgggcatcatgcctggctttggaggctccgtgcgtttaccgcgcctgttgggagccgatggcgcattagaaattattgcagcaggtaaagatgttaacgcagccgaagcgttgaaaattgggctggttgatgccgtagtcactcaggaaaaactgattccggccgcattgagcatgttgaatcaggcaattgcaggcaagttagactggcaggccgctcgtcgtcctaagctggaaccgctgaaactgaattcaaccgaagccgccatgtgcttcaccatcgccaaaggcatggtaatgaaagtggcaggcaaacattatccggcgccaattaccgcagtaaagaccattgaagccgcagccaaatttggtcgtgaagaagcgctgaagctggaaaccaacagctttgtgccactggctggttcggatgtagcccgcgcattggtgagtatcttcctcaatgaccaatacgtaaaaggcaaagcgaaaaagctgactaaaggcattactgcgccaaaacaggctgcggtattgggtgcaggaattatgggcggcggcatcgcttatcaatctgcgctaaaaggcgtgccggtcatcatgaaagatatcagcgaaaaatcgctggatctgggaatgaacgaagcagccaagttgctgaataaacaactggaacgcggcaagctagatggtttaaaaatggcgaagacgctcgcaaccattcacccaacgctggattatgccggtattgaacgcgcgcagattatcgttgaggcagtagtcgagaatcctaaagttaaggccgccgttttaagtgaagtggaaggacttatcggagaagagactgtcctcgcttcgaatacctcgaccattcctattaatgaactggctaaatcacttaagcggccggaaaacttctgcggtatgcatttcttcaacccggttcaccggatgccgttggtagaaattatccgtggcgagaagacttcggaaaaaactattgcgaccgtagtggcctatgccacccaaatggggaaaaccccgattgtcgtcaatgattgcccaggtttcttcgttaaccgcgtattgttcccgtatttatacggtttcggcatgctggtacgcgacggcgtagatttccgtcagattgataaagtcatggagaaacagttcggctggccgatgggccctgcttatcttcttgatgtggtagggattgatactgctcatcatgctcaagccgttatggcgctcggtttccctgaacgcatgggcaaagattaccgcgatgccatcgatgtactgtttgaaaaccagcgttacggtcagaaaaacggtattggtttctatcgctacacgcaggatgccaaaggcaaaccgcgtaaagaaaacgatgatgctatcgacgggttgctggctccggtcagccagccacgccacactctcagcgacgaagagatcatcgcccgagcgatgatcccaatgattaacgaagtggtgcgttgcctggaagaaggcattattgccagcccggccgaaggggatatggcgctggtgtacggccttggtttccctccgttccacggcggcgtgttccgctatctggacactctgggcaccactaaatatgtggaaatggcgcagcgttatgccgatttgggtgcgctttaccacgtacccgccgggctgagagccaaagccgagcgtaacgaaacctattatcccgtagcggcaacgctgcctgatatctccactgaccaaccggcatgaggtctgaaaaaatggaaaacgtagtcattattgacgccgtccgtactccgatgggtcgctccaagggcggcgcattccgtaacgtacgcgccgaagatctttctgcccatttgatgcgcgcagtgttaagccgcaacccagcgctgaatgccggtgaaatcgacgacatttattggggatgtgtgcaacaaacgctggagcaaggcttcaacatcgctcgtaacgcttctttactggcagaaattccacacaatgtggccgcagttaccgttaaccgtctgtgtggttcatccatgcaggctctccatgacggcgcgcgcgctattatggtcggtgatgcgcaaatctgtctgattggcggcgtggaacatatgggtcacgttccaatgaatcacggcgttgatttccatccaggaatgggtcgttcagtggctaaagcagccggaatgatgggcttaaccgctgaaatgctggcaaaaattcaccagattagccgtgaagatcaggatcaattcgccgtgcgctctcaccagcgcgctgaggcagcgacgcgctctggcgcattcgccaaagagattgttccaaccaatggccacgatgccgacggcgtattaaaacgttttgattacgatgaagtgattcgtccagaaaccaatctcgccagtctggctggcctacgtccggcgttcgatccggtcaatggtacggtgacagcgggttcttcgtcagcattatcagacggcgcttcagccatgctgattatgagcgaatcacgcgccaaatcgctgggattaaagccacgcgctcgtattcgctccatggccgttgtcggctgcgatccgtccattatgggttacggcccggtgccagccagtcaactggcattgaaacgcgcaggtttacgcattcaggatatcgatttgtttgaactgaacgaagctttcgccgctcaggcactgtcctgcgtgaaggggctgggtctacgggaaagtatggatgacaaagtgaacctgaacggtggcgcaatcgctctgggccatccattgggctgctcgggtgcaagaatttccacaaccttactgaatttgatggaacgtcgcgacgcccagtttggcctagcgactatgtgcattggtttaggccaaggcattgcgaccgtgattgaacgcgtttgattaaaacaaactgtaggacccgttaattcgggtccgtaccaccgctgtacctggagtttagttgccgtattttcccgcctgtcaggggcgggctttttttgttccggcaaaacggtaaccggaacacagcgataaaaccgtcagataaaggcgaacgcatcgccgtaaatatgcgcttcctgcgcaccgcgctctgcacagaaacgttcgcgagctattttggccatttcaaaacggccagcaatgtaaatatcctgctccgccaatgaaccataatcctgcaacactgcacttaataccgtgcccgttctgccacgccattcgtcttctggctgttccaccacgggaatgaccttcaactgagggtatttgatcgagagcgcttccagctcgcttaaatcataaagatgcttggattcacgtccgccccaataaatcgatacttcccgatttggtttttcagccagcgccgccagcagaatggaacgggcataagagaaaccggtgccgcccgcaatcaggatcattggacgctcgctgccttcgcggaaccaagcttcgccgtgtggaatatccacatccaacgttttctctttcagaatgcgatccatcaccgccatcgcatacagatttaactcagatgcgccaatatgcagctcgatataagcctgctctaatggcgttgacgccatagagaatgggcgcttatcacgctcatccatcaccaccatcaggtattgaccagcgcggaaagaaaacgccgattctggtaccagttgcactcggtataccgtatcggtaatggcctctacggaggttactttacagctcaatgtcgtcatgcgttccctctgtcgggtcatcaaatgcaaaactatggacaaaaatcacgcaatcagcgctcaggctctttgtcactgaatatggcaagctcatcccagatcgcatctacacgcgtgcgaacctgctcatccatcttgataggacggccccattcacgaggggtttctgctggccatttgttagtggcatccagccccattttcgatccaagaccggaaaccggcgaggcgaaatccaaataatctattggggtattttcaattaataccgtatcgcgcgctgggtccattcgggtggtaatcgcccaaatcacgtcattccagtctctggcattaatatcatcatcacaaacaataacaaatttggtgtacataaactgtcgtaaaaatgaccacacgcccatcattacgcgcttagcatgacccgcgtattgttttttgattgtgacaaccgctaagcggtaggaacagccttccggtggcaaatagaaatcaacgatttccggaaactgtttttgtaaaataggcacaaaaacttcattcagcgccacgcccatcaccgctggctcatccggcggacggccggtataagtggagtgataaatcgcgtctctacgctgagtgatatgcgtcacggtaaacaccgggaagctgtctatttcgttgtaataaccggtatggtcgccataaggaccttctggcgcaatatgaccctgctcaatatatccttccaaaacgatttctgcacttgcaggaacttcaagatcgttggaaatacatttaaccacttcggttttatgcccgcgtaataaaccggcaaaagcgtattcggataaggtatcgggaacgggagttacggcagccagaatagttgcgggatcggcacccagcgcaaccgaaaccgggaaacgttcaccggggtgcgcctcgcaccattcctgataatccagcgcaccgccacggtgggataaccaacgcataattagctgatttttacctaacacctgttggcgataaataccgagattttgccgttctttatgtggcccacgagtgatcgttaacccccaggaaaccaaaggcgcggcgtcttcaggccagcaatgcatcaccggaatgcggctgagatccacatcatcaccctgccagatttgctcctgacaaggggctgaactcagacgcttggtcggcatattcagcacttgtttgaatttgggtaacttatcgaataaatcgcggaatcccttcggcggatccggttctttcaggaaggctaacagtttaccaacatcgcgcaatgcgctgacatcttcttgccccatgcccatcgcaacccgtttggctgtaccaaacaaattacaaagcaccggcatctcatagcctttagggttctcgaacaacaacgcggggccgccagcacgtaaagtacgatcggcgatttctgtcatttccagataagggtcaatcggctgggttatgcgtttaagctcccccctctgttccagcaacgagaggaagtcgcgtaagtcacggtatttcatgatgatcattatggcggccacaggatgggccattataggctgtctttatagcagttgctgtctttttgttaaaaatgtatacctgctcgctgtaaatgtagaatcgccatcctccaatagtatttttacactagaaatcatggtttgcgagtgggcaaagccatgattctagtcaggtctttatctgtcactgacggcgacttgtagatatcaggtacgcctcagcgcgaacagccaatgtgggatcatcactgacacgaatcccctgcggcagcactgttggaataaatacttttttatcgcattgctgatcggtaactgtctcgataaataaccgccccatatttacctcacgccgttcagccggccaggactgcgtcgggtcaatcaaattatcacctttctgcgctacgatggcgtacaggtcgtattctataggccccttggctaggcgttgccgcaattcctcttgcaagaaatccggcgactttgccttcgcctgctcatcgcttaacccctgccgtccttccaccggctccatacgccagcgaaccgcatactgggactgatctttataagtgataaaggtactcccgccccaatagggaattgtagcgtagctggcagggacgggctgtgatgcaacatactgagcttggcgcaaagtatgaggatgggattggttaaatgtgttcaatcgctctggattgggctttcctgtttcgggatctggcgtcctgacctttaaaaactcgataaattcctgcggggttcgagcaaaaaagaaaggggatgagatcataactaactgccagcgagagtgcttcgtattaaccagctcaaacgccagtccacgcaagtttttggcgttatcggcggccttaggattcccccctccgattgaaaatcgaccgacaacatcagactgctcgtttttacgcaataaatcagcctgtgaaagttcagtcccttcaccgctggcgataaacttacctgaaaaacaaaagcctttagcatgggacgcccgctgtttactgtgtcggccgaatacatcatttagagcgttaaccatctgctcagcggtgatttcttggggaactgcgccggaaacgcttggcaagcaaccaaaagtaattagacatgagagcaaggaaaaactaacttttcgcatcgattttctccaaccatttctatcttagctgtaatgaatcgcgaccatcattactgcatataatttagaaaattctctcatttcaagcgggctatgttatttaactaatcattaaaaatattagtaaaacttacatccattggtgctttcagatgcgcgatacaaactttcctattatccaaacaggagcaaaccaatccgcagcaagacattgcattcaattggaactgctcctggctgaaaaaaaattattggcaatagaatggaacccaatccgctagcggccgagtatcgtgatattcctgcggctcctcgccgtgatggaatactttaaaacccttatctagcacgctgaaatagcttagctcgttgccgctaacgtgcagcagactgccctcgcgtaaagccacgactctctcgcctggattaaccgcgcaaaactcagctaatcgctcatctcgcgtttctcccatatggccactgatatgcgcatcaatataatgtggattaatttgcagcgggaatagccccagcgacggtaaaacaacgctattacgaaccggcatatcattagtggtgcgaatactcggcgtagccacgttacatcctgcgctccaaccgacataaggcacattgcgctcgcgaaccactctctggataggaacgatcagccctttctcatgcagcatctgatttagcatccaggtattgccgccgctgattaaaatgcattccgcttcgccaatagccgctacagggtcggcggcatggtgaatactggttacagttatgcctaaggttttttccagttcctgagcgcgttgatcaaaatcgctgcggatcaatgcataagggataagaactgctgaggtaattttccggctagtgagcatcacccgaatacgatctttggcataaccaagcagttctgcgtcacccgataccttgccgttactcagcaaaaacaactccatgactctctccttttactattcaacaggacatatctacattaactcgaggcgacaattcagttacaccgaggattaataggttagccttacttatatctgatttcatatttcagggttgtgatacctgctgggaaatctggtgtgcatgaattaattcaccatcactacaaggtattcaatactattttcagcggctatatatctgttatcgcatttgatatgctgatggataggatctcgaggcatatgaaatcatggaatcttggtatttattatattgtaaacgcggacaaatcttgcgagccaaagagcatttagagcgtcagcaagtggtgtgccaaacgcctatcgctgcggtcgagaagattattcggggcaagcgtaaagtggtagacgagcctttgtttcccaattatctgttcgtaaaatttgatcctgagtgcatccataccacgacgatcagctcaacgcggggagtcagtaattttgtgcgttttggcgcagggccggttgttgtctcagattcgattattcaagctctgctcaactattctcaggaagtgattatcgatcctgacacgcctgcttctggggacaaagtccagattactgaagggattttcgaagggttacaggccatttacgcagagccagacggcgaaacgcgctcaatgttgcttctcaaaatcctgaacaaagaagttagtcaaagcctgagcaacaaccagtttgagaaaatctgatatcaatctgaaaacatgacgaggcaagcgtgctatagcgcctgcctcgatattaatgtctagcgctgcatatgctcatcatgcagccactgagcaacctgcttagcgaaataggttaataccccatccgcgcccgcacgtttaaagcatagcaatgattccattaccgctggtttttcctgtagccagccgttttgaatcgccgccatatgcatcgcatactcgccagaaacctgataagcaaaggtcggaacgccgaaagtatctttaacacggcgcaccacgtccagatacggcatacccggtttcaccatcaccatatctgcgccttcctgcaagtcctgcgcaatctcttgcaaagcttcgtcgctattggctgggtccatttgataggtctttttattgccacctttcaaattgccgctcgagccaatcgcatcgcggaatggaccgtagtagcaggaagcatattttgccgaatacgccatgatttgcgtattaatcaacccttgagcttccagacaatcgcgaatcgcgccaatccggccatccatcatatcgctcggcgcaacaatttcagcccccgcttccgcatgagatagcgcctgacgcaccagaatatctttggttatatcattgataacatagccatcttcatcaatgatgccgtcctgaccgtgggtggtataagggtctaatgccacatcggtcaacaaccctagctccggcactgcgtcttttaacgcacgtaccgctcgctgcaccaaaccgtcaggattataagcttcctctgcgtgtaaagatttgaagctcgactcaatgacagggaacagagaaagcacgggaacaccaagtttcgcgacagcttcagcttccttcaccagcagatcgatagtcatccgcgagacgcccggcatagaaggcacggcctcttgtcggttagtaccttccatcacaaacacgggataaatcaggtcattaaccgtcagttgattctcggcaaccaggcggcgactgaaatcgtggcgacgaacgcggcgcatacgacgacctggaaaagtacccggaaatgcatagctcatttttctctcctaactcaaaccaaccggaaaacccggcgagcgttttcagcagttttctgtcctagccattcagggtcttcttctcgccaggcagcaacctgccggacgatgtgaggcagaaaacagggttcattgcgacgagatgcaggtttaggatgaagatcccggggcaataaataaggggcatcagtttccaacaataaacgttcggcaggaatacgtggcaataaggctcgcagctcaagaccacggcgttcatcacatacccaaccggtcatacccactgacaaacccagcgacagacaatcatccaactccgaagccgagccggtaaagcagtgcacgacagccgcggggagcttttccagccagggagacaacagatggacaaagcgatgatgagcatcgcggcaatgtaaaaatactggcagtgacagttcggctgcaagagccagttgcgcagtaaatgccgtctcttgctctacaggtgtagaaaagttgcggttaaaatccaacccgcactcccctacagcgacgacagaaggtgaagccgctagagcatgaatttgctgctcaaccgacgcgttccaactactggcatgatggggatgaacgcctgccgttgaccaacagtaatcagggtactgggccgccaatagtgcagcttcatggctttcttctgcgctggtgccggtaatcaatagaccagcgactcctgcttcttttgctctttcaaccacctgatgtctatctttagcaaactgtgtactggttaagttgacgccaatatcaaacatggttatcccaaaacagaagccgcccaaaggggcggcttgacttgtaaaactgaagcttaaggtgctttaggttggtcttcctcgtcctcatcctcttcttctgtcaccggacgacgctgcttaccgacataaaaacgggcaaaaaagacgccaacctcaaacagaagatacattggaatcgcgagtaacgtttgtgagaagacatcgggcggggtcaacaacatccccacgacaaaagcgcccacgagtacataaggacgttttttcttcaaatcttcggggctggttacgccactccaacacaataagataatcgcgattggcacttcaaaggaaatcccgaaggccataaacaaagccataacaaagctgaggtaattattgatgtctgtcgcaatcatcacgccttccggcgccgttttcgcaaagaaaccaaaagccaacgggaaaacgataaagtaggcaaatgccattcccagatagaacagcaggctgctggaaaccagcaacggtgccatcaagcgtcgctcatgcttatacagcgccggtgcgataaatgcccacacctgataaagaatcattggcgcggcaacaaaaaccgacaccatcatggtgagttttatcggcgtaaagaatggcgatgcgacatcggtcgcaatcatgctggcaccttgcggtagctgctttatcaacggcgctgaaactaactggtagatatcattggaaaaataaaccaatgctaaaaaaaccaccaatacggtgattatgcaattcaataaccgcttacgcagttctatcagatgactgataagaggttgggtatcatcaacagccatgtttaccgatcgccgcctggttggttaagactaggttgtttagaagctggctctgcatgggataccggcgcggagttaaccgaattcgccactaccacatcagtttgatccgccgccgcagcgggcgctttatcttccgaatggctttctacgtggtgcttttcgagattaactggcgcttccggcgctttcaccggcgcagaagcaactgtcgctgactccgcaggagtcacgccatcatgaatagcttccggatcggtcactagcgggttatgaatggtatgctgctccagcgccgaatccggccggtaggaacgcttcagcgattccgccgcatcctttaactcatccatggaagcctttagctcaggagtcagattttgcaggcccgcctgttcggcttttttcaggctatcctgaagttcctgcaatttgagttcctgagacagctcattttggaccgtagcagcaagcgaacgcaatgcgcggatccagccagccacggttcttactgctaccggcagacgttcagggccaagtacaaccaggccaatgaccattaccagcagcagttcactaaacccgatgtcaaacacggtttatacctgctctttgttctgactcttagactcttcagcttttacttctggctgcttatcggtaatagtcttcgttgtaaaatcagcgtcgttactggtcttttcaacgtttgtcggagtctgggtatcgtcaccaatcgcttttttaaagcctttgatggaagcacccaagtcagaacctaaagtccgcagcttgttagtaccaaacagcagaacaacaattacggcaatgattaacagttgccaaatactgataccacccatttcaatcacctctattaacaggggttattccaaagataaccgcattatacggcatagtttgtctctggatactgatctaacttactacgtcttacctaatctttatacggcagacattatttgtaacgacgagcttttcgaaactgaccgctacgaacttgttcgtctccagccgataacccacgccaatgctcccgccaccagtaacccgatagaaatctcggttgcaccagacagctggaaaatcgttccactcactaatagtgtagcgccaacgccgaacaaataccgtgattgcccctgacgttgttgctgcccttgcatctgcgttgtgagcttatctacgctttgctgcaatagtttatgctgctgaaggctgtcgtaaaccagttcaggcaactcagggaatttctctgcccagaaaggtgctttttccttcaatgctcgaataaccgccggaatcccaacctgatctcgcagccagctttcaaggaaaggtttggccgtggtccacagatctaactgcggataaagctgacggcctaacccctcaacatagagcaatgttttttgcagtaaaaccaactgtggctgcacttccatattgaagcggcgagcagtattaaacagattgagtaatacgtgcccaaacgagatttcagccaacggtttttcaaaaatgggttcgcaaacggtgcgaatggcaaattcaaagtcttcgacgttggtatcgcgaggaacccaacctgaatcaacgtgtaattcagcaactctgcgataatccctattgaagaaagcaatgaaattctcggccagatagcgcttgtccgctttattcaatgaaccaacaataccgcagtcaataccgatataacgtgggttctcagggtgttcatagctgacaaaaatattccccggatgcatatccgcatggaaaaaactgtcgcgaaacacttgagtgaagaagacctgcacgccgcgttcagccagtaatttcatattggtgccctgactttcaagagccgcaatatcagaaacgggaataccatagatacgttccatcactagcacgctttcccgacaataatcggagaaaatctctggaacgtacagcatcgggctatcttcgaaattacggcgcagctggatagcattggccgcttcacgtaacagattcagctcatccaacagcgttttttcgtactcgcgcaccacttctctcgggcgcagacggcggccatcaggcaacaatttaggtacccaaccggcaagtcgatacatcaaacggacatcagctttgataatcggccgtatatctgggcggatcaccttcagcaccacttcctgaccattctcttttaaacgagccgtatgtacctgagcaatagaggccgatgccagagcttcctgttcaaaatcatcaaaccaggtttccagcggcccgcccatcgccaactcaatgtgcttacgcgccagcgcgccatcaaatggggccacgcgatcctgtaacaaggccaactgatcggcaataaccggaggaaacagatcgcggcgggtcgacatcatctggccaaacttaatccagacggggcctagttcctgcaacgctaaacgcagacgctcgcccagaggcttatctttgtgacgattaggaatccagaagaacagatagcggccaatgcgtaatggcagcgttaaacgaatcttcgggattaactcatccagtccgtaactcaaaaatacccgaataatcaaatacaggcgccgaagttctcctggcgtcatcgttttgcctccatcttggccaaccgggcatcaaaagcatccacatcacgcttaattgcatcaacttcttcgttaaaccagacaatctccaacggagccggtgccaatttccactcttcagttaatacttcagccagataagcctgctgctgctgaaaacggctgactaaaaacttaccgcctttacgcaatgtctgccctattgtttctgctgcgatatcaccaatatagggcgctagccattcggcaggttcccactcagcgagatctaataaagccaccaattgttgaacgacctgaatgtcaccatcgacgatcagctcaccgctgcgcattaaaggtgacagctgctggcgatcccgaagcttcgataacactgcaattccggtttttaccgtacagtccgcattgccttcccacgcgctcacaacgtcaacctgggcatcgctgaacaccagaaccagaggttggttcagctcatgcagctcaacacgtaatactttggaagacaaacgagagcgagccgctttcataccgcgatcgcggaatagcagactattgagtgcagtttccagagccgccgttatcagcggcgttaataaaatcggcttcagcaacattggttttaacaacattggttttaacaacattggttttaacaacattggtttcaacaacatgggcacatccatatcagaacttaaacccacggtgtaatgcgacaataccgccggtcaagtttgtataggttacattttcaaagccggcatcaaccatcatatcttttagcgtttcctgatccggatgcatccgaatggattcggtaaggtagcgatagctgtcagcatcattaacaaccattccaccaatttttggcagaatgtggaatgaataggcatcgtagactttagtcagcggctccagcagcggtttggagaactccagaaccaacaggcgaccacccggcttaagaacacggaacatggatcgcagcgctttttctttttcggtgacatttctcaaaccgaatgaaatcgtgatgcaatcaaaatagttatcagggaaaggtaaagcttcagcatttgcctgcacgtagctaacgttgccaagaattccgctatcgcgcagtttttctcgccccattcgcagcatggattcattgatatcggccagaacgaccaggccttgctcacctaccagtcgagagaatttggccgtcagatcgcccgtaccaccagcgagatccagtactcgctgaccacggcgaacgccgctacaatcaatggtaaaacgcttccagatacgatgaataccgaatgacatcagatcattcatcaaatcgtatttcgccgctacggaatgaaaaacttctgccaccatgccttctttttcttctttggctatggtgcgaaaaccgaaatgagtggtttccttatcctgatctaccattttctctgcctgcttttcagtcaatctttcggaggagtgtaccagaaccgaggtgaaagccccacttcgcccagcgttagccggttagcctgtccgctgattttcagcgcgaacatagcgagtgagacactgctaattctgatatttcagtgaagtcgaatcatcttgtaacgacgattcagcctcatcgtttgagagggctaaatccccctctggatcgtgctctgcaatggcgcgtgcagccaatgacgggctaataggttttttcacttcaacacctaaggcacgaaaactttcaacttgccctatcaggttaccacggccttgagccagtttgttcattgcctgacgataacttatatgtgccttatcgaggctttggcctatggattccatgtcatccacaaacaaacgcagcttatcgtagagcttgccagctcgttcggcgatatgttgggcattctgactctggtgctcgtaacgccataaattcgtaatagttcgtaacgcgaccagtaacgttgtcgggcttaccagcatgatgttgtgctgtagcgcttcggtgatcaactccggctgcctatctatggcaaccaaaaaagcaggctctaccgggataaacatcagtacgtagtcgagcgtacgtaaacccggcaactgctgataatctttacgacccaactgtttgatatggttacgcaatgatgaaatatgctcgttcaaagcctgagttcgctcggtgtcattatcgctattgaaatagcgctcataagccaccagcgacattttggcatcaatcaccacgtccttaccctgcggtaaacgaacaatcacatccggctgcatccggctattgccttcaagattgacgctaacctgagtttggtattcgtaaccgtcccgaagtcccgaggcttccaacactctgccaagcacaacctcaccccagttcccctgagttttattatcacctttgagcgctttggtcagattgagggcttcccgtgccatctgggcattaagttgctgtaggctccggatttcgtgagtcagcgtatgacgctcacgggcttcctgaccgaaactatcctgaacctgacgacggaaaccgtccaattgctcgcgcaaaggcaggagcaacttatccagactctgcttattctgttcatcagccctacggccagtttgttcaaagatgcgatttgccagattctcgaactgagtggtcaggcgttgttcactattcatcaataatcgctgcttttcttcagcagccaggcgcgtttcctccagacgaatggtgacttcacgcagttcggcctcctgcgcactgttcacttctctctgggcgcgcagttcctgattaagttgctcacattcattacgccaatgattaagctgctgtagcttctcactgccagcagccagctggctatgcaggctgcgtaattccaacgcattctcctgcaattgttgctctttacgccgttgggtctcctcctgctggactaagtcctgttgcgactgttgcaatgattgttccaacagccgtagttcagtttctcgctgtgtattacgctgctggaaacgcaaactggcaattaaccagcccagcaggccccccataacacagccactcaagccccaaaatatactggtatccacgctgcctccgcctcattaaccctctgcccgtcaaggtaaggggatactgtatggatgtccagagggttttcgccttacatccaaggatgcgaaacagtacgcaaaactataactccatgcaaaattcggtattctcgccaccggtaaatcggctaaaacaaagtggaaccgaatacaacctgtagggaggtcaacccatccaatgagtaagccatttaattccgaaagcaccgggcgcgaggatgccaaaggcccaaatcaacgccgaagtaatattggcaaactggaaataacgttgaggcatggcgcatatgccagcaaccaaaggaacgatggcgcgcagcgggccgaagaagcgcccgataaaggcaccaaatacgccccagcgctcaaaaaacgcgtgaccacgtaccagtaattgaggatttcgcgaaagtggccacatggttgccacgcgatcctgataatggaaaccaatccaataggagagccagtcaccgaagaaagcaccggccgcagccgcagcccagatcggccagaagggaattccgctttcaccgatgagcgcccctagccccaataagataacggtcgcaggcaataacaatgacaaaaaagccagcgactcaccaaaggcaaggaaaaagacgataggtgcagcccagatttcatgttcacggacaaaatccgttatgtaggttatgacgtcattgagggtcacatgcatcttcctgttattgatgagattacgagccaacagcataaccaattcacggcagctctaactcaacaaaaaataaacggccggtaaatgccagccgtttaaacaggttaacgtacagaattaaatatgtcaggcatttgccgtgacggagcgcttagacatctcggcggaacgacgagtccaaagctcacgccattttctcaaagcggcgatgaggatgattacgcctagcgtcatcataatgatggatatgatgccgttaaacaggttgtagcccgaagccgcagagttaaagtacacatgtctgatcatccaataaccggcataatttacggtaacaaacaggtaagccagcgggataatacaggtcagcatatagatacgtttggtagccaaacgcaggataatggttgcaccaataatcaagccaacggatgccattaactggtttgatacgccgaacagcgcccaaacggagttgatatcaccagagttcagtaaatagccccacagcgcacaggcgataacgctacaagccagagtacccggtagccaatccgtacgtttcagtggtgcccagatatcgccgaggaaatcttgcagcagatagcgtgcaacgcgggtaccggagtctacggcggtcaggataaatacggcttcaaacatgacaacaaactggaagaagtaggccgccagactgctgaaccatggcacgcggataaagatatctgtcatacctacggcaagagtaactgcgccaccggtacgaccgtagagatccagaccgatctcctggcttagcgttggtaggttaaccacatccatgcccaacgcgccccaagcttccgcagaggagttaattgcaaaataatcagcgggatgcaatgaagttgcagcgatcagcgccatgacgccaaccatacactcggccagcatagcgccaaaacctaccggtaaaatatcgctccacttatcaatctgtttcggcgtggtgccagaaccgataaatgcgtggaaaccagagattgcgccacaggcaatggtaatagaaataaacggccagaccgggccagccagaaccgggccaccgccgtggataaactgagtaacggcagggaactgaatttccgggttaatgaaaacaacgccgattatcaacgcgccaaatacaccaatcttcataaagctagacagataaccgcgcggagttaacagcatccacaccggcaaagcggtcgcgaagaaggcatacaaaggcagaatgatactgacggtattggctttcaacgtcagccattcacccagccaggttccttcgatataagggcccacgaaaacacagaccataatcgcggcaatacccacgtaggaagcgcctctcatgctgccggtcattcgctcccacaaacctacgcaaatggcgataggaatggtcatgaataccgcgaaagccccccaagggttgcgctccaacgcatgcaccacaaccatagataaaccggccatagtgattgtgatgatgaacaacatagccaaaccggtacaccagccggcaatcggccccagttcggattttgcgacttcagaaagagatttaccctgatgtttcatcgaggcaaacagcacgacggtatcgtggacagcgccaccgatgacacagccgattaacagccacaggaaacccggtaagtaaccgtattgcgccgccagcacggggccaaccaagggccccgctgctgcgatagccgcaaagtggctgccaaagttgacccattttttagtaggaacgtaatctttaccatcttcgaaggtgtgggaaggtgtaatttcagtatcatcgacctgcagtactttccgaacaaaaaagataccgtataagcggtagcagatcgtcagaatacatactgtggcgataacaaaggtaatcgcatgttgcatgattattctctccagggaatttatcaggcgttaacatacgcctggcctataagagaagcgctgaggatctgattaagcggtcgccagcatgattaagcggtcacaaaacgccgctaagtggcgatcggaaaattgaagatatacgaaagaagcaaaaagctgacgacggtaccgccgccaacaatatgatattaatcacaaaaaatgagttttatatttaagagttactcaagataatacgactgaagttgctctctttcagcacgacccagaccgaactcctgcagtaaccagttatcacgattaccatagcggtcattaatgctggttaatgcggtatgaaggaattcttctctggctgaaagcacgtaagcgaactgattcaacgcattatcgtgaagctttttagccagttcgctcaacattaattcgcggaacggcgcgagcgtcgtttcagttagcaagtaatcctccagaaccgttgcttcatcggctcccagcgcaaacaataccaacccggaaccaacgccagtgcggtcttttcctacggcacagtgctgcactacgccagtaccttcagaattacgcaataaatgaactaactgtcggtaagccgagttgttaaaaggcaagcggcgataaagctccagcataaatgaacgagcatcaaactcggctagcgtttcgttactgagcttatccagattggcgttgacgtcggtactgagagggttcgcggggaaatgatggtatgtggctccttgccaaaggatatcgggtttagcctgaacttcatcggcatcacggtaatccagtatatggccaacggcacgcttatgcagaaaagtacggtctttttcactcaaccgatctaatgaaccggagcgaaacagtaatcctcgcttaactctgcggccatcggctgccaggtaaccgccaaaatcacggaagttaataccgccatcaagcggaaccagtgagggatgctgtgtaaaaggggtagtcataatatcctcttattatatcgtccattataagaggtaaaaccttaccagattatcagtggaaggaaagaacgggccaccagaggcagcccgacacgcgattacaacaagcgacgagctgcttcaaccacgatttttaccgcatgactttcggttttttgcatagtctctgcgttaggaatttcttgctgggtacggtttacgataacaccggcaaccataccggcgcgcaggccttggctggcgcacatagtcaacagcgtagcggattccatctcatagttcatcacgcccatagcctgccattcttccatcgagccacggaaacggctcactacgcgaccagagaaagtatcgtaacgttcctgacccggatagaaagtatcggacgaggcggtgacaccaatatgcgtggtcgcgccaatggatttagccgcttcaaccaaggcggtagtacaagcgaaatcagcaaccgcagggaactccatcggtgcgaaatgcagactggcaccgtccaaacgcactgcgcctgtggttaccagaacgtcaccgacgttgatgttaggctgaatagcaccggtagtgccgatgcgcaggaaggtacgtacgcccaactgagccaattcttccacggcgatagaggttgacgggccgccgataccggttgaacaaacgataactgccttaccgtccaattctgcacgccatgaggtaaattcacgatgagaagccagatgtactgggttatccattaattttgcaattttctcaacacgttgtggatcacccggaacgatggccaaagtagcccctttcagatcgtccttcgtgaggccaaggtggaaaacatcggatttagacatgtgagactcctctttcatgagaaatattgtagggaggaacaaagaactactttactcaatatcaccgaattatttcgtgatagcagtcactttgatagaagaaatagaatgtataagaacaaataaagtgtgacaaaaatcacaaaataacaccgttcaggttattttttgtgctttaaaagccctaaataagagtaacagcatccagattcactcaacggccgaaaacagagtgtgtgtcagctcaccttttcaccgttcgagcacacatttaatccgttacgacatcgcctttccgccattaattgcaaatattacctatagttaaatccggaaaactcattcgctaacttcagggagaccattatgaagactgacccactcattactctcaggcaaacagccggaaagttcacgccggccgttaatccgttggcctcctccgttattcataccgataaaaaaggcattcaggccggtgatactacaatcccgtcgcagggtgatttgctgccagcttatctcgctaaaccggcacaacataatggcccttgcccggtggtgattgtagtgcatgaaatcttcggcgtgcatgaacacattcgggatatttgccgccgcttagcgaaacagggctatttggccatcgctcccgagctgtatttccgccaaggtgatgccagcgaatacaatgatatgaggccgttagtcagccagttggtcaataagatccccgaccgacaagtattagtggatttggatcatacggttaactgggcctcccgccacggtggggatatcagtaagttagcgataaccggtttttgctggggagggcgtatcgcctggctttatgcggcgcataatcctcagttgaaaacggcagtagcctggtatgggaaacttattggggataaaagccttaatagcccgaaacatcccgttgatattgcgatcaacctttccgctccagtactgggcctgtacggcgggcaggattcaggaatttcacaagatcagatagaaaccatgcgtcatgcactacgtgccgccaatgccgacgctgaaattattgtttacccggaagcgggccacgcctttaacgccgattatcggcctaactacaatgcggaagccgctcaggatgcctggcagcgaatgttggactggtttgctcgccacggcgtcaatgcccataaaccggtcgatgatgcctcttaaacgtttcaatccatatctttcaccaacattcccacttcggcataaacctcccccagcagcaagatagggggaggtttttatctatcagtcgcacaaaattctgcacgcatcaatttgatacttctattctccaatagcggtttcaccgtcagtacctatcagctataaaaaagggcgctaacaaagttgagaagcggagacatgtgccgaatgggtcggaacagcgtgagccgtcggcccccctctcggtgcagtcgccccaccagcttcggggtaactgcataggcttgccatcaacagcaaggccgccactgcgcctttgattcagtgataaataatcaggcttgctcttcacgcagccgctgggccgccaagaccatgttggccagtgactgacgggtttctggccaaccacgagttttcaggccacaatccgggttaacccacaggcgttcagccgggattcgctgggccgctttacgtagcaaggcttcaatccattccacgctaggcacgttcggcgagtgaatatcataaacgccgggtccaatctcatttggatagtcaaagtcttcaaatgactcaagcagttccatatctgagcgggaggtttcgatggtaatcacatccgcatccaacgcagcgatagaatccatgatgtcgttgaactcgcagtaacacatatgggtatggatttgagtatcatcctgcgccacggcggcattcagcttgaatgcatccactgcccagtccagataggcctgccattcagcccgacgcaggggtaaaccttcacgcagcgcgggttcatcaatctggataataccgataccggctttttccaaatcttccacttcatcacgcagcgccaacgcaatttgcttggcgatggtttcacggctcacatcctcccgcgggaatgaccagcataggatagtgaccggcccggttaacatgcctttcaccggcttgtcagtcagggattgcgcatattgggcccattcaacggtaatcgcttctgggcggctgatatcaccgataatgaccggcggttttacacagcgggaaccgtagctctgtacccaaccgttttgcgtaaagacgaagccatccaaatgttcaccaaagtattcaaccatgtcgttgcgttcagcttcaccgtgaaccaacacatccagccccagccgctcctgctcggcaatcgcctgtttgatatgctcgctgataccggtgcgataatttttgccatccaggcgaccttgtttgaagtccagacgcaagccacgaatttcagtggtttgcgggaaagaccctatggtggtggtcggccaggccggtaaattaaagcgtttacgctgcgcttcggcacgctgtgggtacgggttttggcgctcgctgtctttcggcgttatagccgccagacgttgttccacgtgtggattatgaacccgacgagaggactgacgagcgcgaattggagcgctgtaattcgctaattttactagtttttcttcgtctggcgcattcagcgctttggttaacagagacaattctgcacatttttgcagcgcaaaagcaaaccagtttttcacttctgcatccaaacgggtttcttcactgagatcgattgggctatgtaataacgaacaagaagtccccagccatagttgacgactgccgaccaacggctgcaaacgttcgaaccatgtgctcagatcggcacgccacacattacgaccattaatcacaccgagcgacagcagccaatctttgggtagtttctcattcagcgtagcgatatcgtctttaccagccactacgtctacatgcagcccctgaaccggcagagcgcgaatagtatccagattgtggccgatgctatcgaaataggtggttagtaatagtttaacctgcccttgtagcgactggtaagccggttggtaagcatcccgccattctttaggcagctccagtaccagcgccggctcgtcgatttgtacccactcgatgccacgtttagccagctcggccaaaacttgctgatacaccggtaagatatctttcagtaaggttaaacggtcaaattgctcacctttgactttacccagccacagataggttatcgggccaagcagtaccggcttgattttgtgtccgagcgccagcgcttcgtcgacttcatccagcaattgcgtccaaccaagcttgaattcctgcccttgctggaactcgggcaccatgtagtggtagttggtattgaaccatttggtcatttctgccgccgctgccggtttaccggttggcgcacgaccacgaccaatgcggaataatgtatccagatcgatactcccatcagcattctggtggcgtgccggaacgttacccagcaacaaactcgtggttaacacatggtcgtaccaggcgaaatcgcccaccggaaccagatccacgccggcttgctgctgttgctgccaatgacgagcccgcaattcgcgccccacattgagcaattcttcctgcgtgatgttgcctgcccagtaactttcttgtgctttttttagttcacgtttcagaccaacgcgtggaaaacccagtgtgtgatttaaaattgccatcgtcatactctccatttagccatccagatgtttacacatccataatcagcaggtactgtattaaccacaagcgcaattttttcactgtcactgtgaaggactctcatgatcgaactgaaacacttacgcacactgcaagccctgcgtaataccggatcgctggctgcggcagctacacaacttcatcaaacccaatctgccctgtcacatcagttcagtgatttggagcagcgtctggggttccgtttgtttgtacgtaaaagccagcctctgcgtttcactactcagggagaaattctcttgcagttggccgagcaagtcttgccgcaaatcaaacaggcactgcaaacctgcaaagaaccccatcaaacggccctgcggatcgctattgaatgccatagttgtattcagtggctaactccagctttggacaattttcaccagaactggccgcaggtcgcgatggatttcaaatcaggggtcacttttgatccgcagcccgcgctacaacaaggtgaacttgatctggtactgacgtctgacattctgccccgcagcggtttgcattactcgccaatgtttgattttgaagtccgtctggtgctgtcgccggatcatccgctggcagcgaaagcacgcattgaaccagaagatttaaccgatgaaactctgatgatttatccggttcagcgccaacgcctggatatttggcgtcatttcctacagccagcaggcgttagccccgcgctaaaaaatgtcgataacaccttgttattgatccaaatggtgtccgcacgtatgggtattgccgctttgccgcattgggtggtggagagttttgaacgtcagggtttagtcgtaacgaaaacactgggggaaggtctatggagccgactgtacgccgctgtccgtgacggagagcagcgccagccggtaacggaagcatttattcgttcggcgcgtcagcacgcttgcgctcatctaccttttgtaaagaatgcggagcgacccaacgccggtgtacccacagagaggccattatcaccgtcccaccaataataaagctcggccaatgcggtttttcctgccagatagccaggttgaccaataggccagcaggaacatggacattattcataatgccgagggtgcccgcatcaacctgcgtggcaccgtagttccacataaaataacccagtgcggaagctccaacgcccagccaaatcaaaacgccccactgcaactcggtggttgggagtttatttgcgttaccaaaggcgaaccaagcgacgactgcgaccaacaaggctcccagataaaaccaggaaaaagcggtgtgctgcggaatcggatgcacttccatcaggcgtttgtagccaacctgtccaatagcaaaacaaacattcgccgcctgaactaaagccaatcccagccagaaatgctcgctcagatggtcataacgaatgatagccgcgcccactaccgctaataaagcactgagtgcataaccccagcgtagccgctgaccgcggagaagatcataaatcagagtgacatacagcggcgtcatcacggtaaacagcaggaactccggcacgctgagatacaaataagcacggaagctgaacaggtacataatacctaactgaatagcgccaacggccatatacagcgcaatcactctgccctgaatattcttccagcgaataaacggcaggaaaaccacggcggctaaaccaacgcgcatcagcacggagaaccagctatcgacctgacccgccagatattcgccgattaagctgaaagaaaatgcccacaagatagtggtaataaccaataacaacacgataggttaagctcatcgaagaaataaaaaccaattgtatcggaagcgagagctgaattttgcaccaacatggttgacgtatgcataattattgttcgattgattgtctttcgcagattctggcaaccagaaataaggaatttaagatgagacaaatacattttctgctgggcgctctacttctgcccaccgtagtattggcacaaaacagcctgacgccaacgcctttggagcagcaacagcgcgtattaaatcaacaaagtgaactgcaccaacagcagcgaactttgataaatcaacagcaagaacagcgccgcttgcagcagcaatatcaatattcgcaggatcagcgccgtttgttacagccaacaccggtggctccgattgctccccccgccgatcctttcaagcgaacgacgccaacggtaccgagtattcagccggtaaaacctgcccaataacgctcagattctcacgcccattagtgttaaaatcagcggcgtagttattgcagccaacgcggtagacatcactaaactggcagcggccgggccggtcaatgcgttaaattgtcgcgacatcagatacacgttgactccggtcgccatcgagccaagcaataccaccacctgagtttccagcggtggtaagcccatggcccatgctagaacccacaccgccaatggctgaacgatcagcttcagaaaacacatcgcactgctgatacgccagccatcgctgacacggtattccgccaatcccatacccagtaccaccaatgacagcggcggcgcaacctgccccaacatactgaccggctgatcgatcatcggcggcaatttccatcctgtcagactgaataaagtgccggagataatgccaataatcagcgggttggttaaaacactgcgcgcggtcttggcaaagccttgcaccgtcagcgaaccgttacgcgcccattccaccgacaccgtgactaacgtccataaaatcagaccgttaaacactaaaaccaacgccaccgctggaatagattcttcccccagcatcaaagtggctatgggtaaacccagcatcacgttattggaaaatatgccgcccaaagcgaataccgagccggaaacaccgtccaacttgaatacccgccggccaatgattcgcccaagaataaacaccaacagacaactgccgaaaaaggcgattagcaggcgcgcgtctaccgcaggccgatcggcaaaattactcatcatccggaatagcatggccggtaaagcgagggaaaaaacgaagcgcgtcaggccatcggtaatgtttgacgtccattttccgattctgaccaacccatatcccagaaccaacaatacaaataacggcatagacaacaagatctgatgccagagggaaaagataaaggcgggcatgaataatattcctgtcgcgggttagggtcagcccgcctgataacggaggctgacctaataccaacaggagtctgacgggtcagcgttcggcaaaatccactgcgatcaaatctatacggtcggtgcagatacagtcaacgccccaatctaacaatacccgcgcccgctccggcttattcaccgtatacaccaaaatatgcaatccggcggctttcaatagcgccacgcgctccgccgtcagctgtttatgattaatatgcaaagatacgcagttcagacgccgcgtcagctcaaaccagttttcatcccattcgtccagtaacagcccgcgtggcagttctggggccgcttcctgcgccgcttcctgcgcggtaacagaaaaagaggaaagcaacggaggaatagcctgaccttcccacaacaaccgagccgccagcgcaacgacgcggccagtgtaagcttctacgccggtggtgggttttatttcgatattcgccgccataccgtgctcagcgcagcgcgccgccacttcagacagcaaaggcagccgctcatccttaaacgctgagctaaaccaattaccggcatcgagttgaaccaatttatcccagggcaaatcccccgcaacgccccagccgttgctggtgcgctccagcgtatcgtcatggagtaaaaatatctggccgtcctgagaaagtttggcgtcaaactcaatcattttgtggccatggcgcgcgccgacgtcaatggccgccagcgtattctctggagccagtgaaccaccgccgcgatgagcaacaatgggaggataaggccagtttatattcatcattccatccgtaatccgctttcggtatcaaaaaaatgcagcgcttgcgcgggcagcgtgacatataaggtactgcccacatctggcatattctcatgggaaagacgagcaatcacaccctgtccatcccagcgtccatgagccagattatccgcccctagcaattccagcgttagcaagtttagcgctactccgccctgctctaacgtactgagttgaatatgctctggtcggatacccaaggtcaaccgccgatccgcccattccggtttagcatgctcaagcgggatacaagttccgtcgttcagtaaaaactgctcgccgttggcgctaacgctgcccgctaacaaattcatcgccggagaaccaataaaactggcgacaaacaggctggccggccgcttatacacttcgctcggcgtaccgatttgttccgctacgcctttattcatcacaatgacccgctcggccaacgtcatagcctctacctgatcgtgagtgacatataaactggtggtttttaatcgacgatgcaattgctgtagctccagacgcatttgtacccgcagcttggcatccagattcgacaatggctcatcgaaaagaaaaaccgcaggttcccgcacgatagctcgccccatcgccacgcgctggcgctgtccgccggataattcgcggggtttgcgttgcaacagcggttccaactccaggattcgcgccgcttcgtctacccgctggcgtatttgctctttgccaaatccgcggattttcaggccgtaagccatattgtcgtagacgctcatatggggataaagagcatagttttggaataccatagcgataccgcgatctttgggttccagattagtcacccgacgattatcaatataaatatcgccgctggtggtcgcctccagcccggcaaccattcgtagcaaagtggattttccgcagccggaagggccaaccatcacgataaattcgccgtcggcgacgtctagatcgatggttttgatcaccggcgtcacaccgtcataggatttacttactgcctgaagctttaaacatgccatatcagatcacttctcactgtctaccagaccgcgcacaaaccagcgctgcatcagaagaaccaccgcaaccggtggaattaacgtcagaatcatggccgccatcacctgattccattgggtcggcgcgcccgaactggagatcatgctgcggataccggctacggcagtgcccatcgaggcatcgctggtaatcaatatcggccacagatactgattccagccgtagataaaggtaataacgaacagcgccgccagattggtttttgacagcggcaatacgatgtcccagaaaaatcgcatcgcaccggcgccatcaatgcgcgccgcttccagcagttcatccggcaaagtcataaagaattggcgaaacaggaaggtggccgtcgcggaagccattagcggcagcgttaatccggtgtaactgtccaacatattcaggttggcgatcacctgaatagtcggaaagattcgcacttccaccggcagcattagggtgagaaaaatcagccagaaaaacagattgcgcagcgggaaacggaaataaacgatggcgtaggcggagagaatcgacaccgtaattttcccaacggtaatggcaaatgccatcacaaaactgttaaacagcatcagcccaaagggagtgccgttgctgcccacgcccccgtgccagatattgctgatgttttgccacaaatgagagccaggaaccagcgttatcggcacctgaaacacctgttggtcatccagagaagcggcaacaaaagcgacatacagcgggaataaaatcagcagcacgccaataatcagcatcacatggcagaaaatatccagccctcggcggttctcaatcattggtaacgcaccttacgttcaacaaagcggaactgaatcaccgttaaacctatcaccaatagcattaacactacggattgagcggcggagctggagagatccaacccggcgaaaccttcgcgatagattttataaatcaatgtagtcgtggactgcactgggccaccgccggtagcggcatcaataacggggaatgtatcgaaaaaggcatataccagattgaccaccagcaggaaaaaactcacaggggaaatcaacggcagcacaatattaaagaagcgcctaaccggccctgcgccatcaatcgccgcggcctcaaccagtgaacgaggaatggactgtaatgccgcaaggaaaaacaaaaagttatagctgatttgcttccaaactgaggccagtaccactaaaaacatcgcctgaccgctattttgggcatgattccagctgtagcccaacagcccaagaaagtgagtaatcaacccaagtccggggctaaacaggaaaatccacagcaccgcagcgaccgcaggagcaaccgcgtaaggcaaaataagcagcgtttgataaatacggctgccgcgcaggacgtaatccaccaaagcggcaaaaaacagcgaaacggccagaccgattccagccactaatccactgaaaatcagagtggtatagaaagaggccagatagtattcgtcctgaaatagctggctaaaattgcttagcccgacaaactcactggaaagtccgaaaggatcgagagactgaaccgaataccacagcgcttctaccgcgggccacaggaagaaaatggcggtaatcaataactgcggcagtaccaacaaataaggtagccaactacaggaaaaaccggggcgggacgtactcataaccgattaactctttgcaatgttgaactcttcacaccacgctcgcggataaccctatgcagctatccgcgaggcggtgttctccggtttatcaccgaagaattaaattacttattggcttgttcgaagcggcgtagcagcacgtcaccgcgttttaccgcgttgtctaacgcttcctgcggcgtcttcttacctgtccatacgctttccagttcctcatcaaccagggtacggatttgcggcatgttgcccagacgcagacctttggtataaggcaacggcggcttgttcaacatttggcgtgtggcaacgtctgcccccgaattcttatcgtagaagccctgttgtctggtcagttcgtaggcggcggtggtaatcggcagatagccggttttctgatgccattctgcggcaatttccggctgtaccaggaattgcaggaattcggctacgcctttgtaagtttctggatttttgccattcatgacccacaaactggctccgccgataatggcgttctgcggcgcatttttagcatcggcgtcgtaaggcatcatgcccacaccgtaattgaattttgcgtagtgacgaatatccgccagcgaaccggaggaggcagtagtcatagcgcagtcgccgttatagaacttggcggtagattcatctttacggccaaaataggtgaaatcacctttcttattcatatcagacagcagctggatatgtttgacctgtagggatttgttgaactcaagaaccgcatccatgccgtcaaaaccgttatttttgctggcgatcggctgaccgtgccaagcgctgaagttttcaatctggatccagccttgccagccgctggcgtaaccgcaggtcataccggctgcgcgtaatttctcagtatctgccgccagttcctgccaggtttttggcggctgatccgggttcagaccggcttttttaaacgcatctttgttgtaatacagcaccggcgttgagctgttaaacggctgggataataagtggccggttttagcgtcagtgtaataacccgcgaccgtaggaacgaacaccgactcatcaaaattcacaccggactctttaaatacttcaaagaccggttttatcgctttactggccatcatggtagcggtgccgacttcataaacctgcaaaattgctggcgccttacccgaacggtatgcggcaatccccgcggcaagattctgctcgtaattacctttatacacagggacaattttatagtcgggatgagcctgattaaaacgctgggctagagaatcaacctctttacctagctccccttccatagagtgccaaaaaggtatttctgtcgctgcgagcgcattggcactcaatgccaaagtgagcgcagcgccaatagcggttttacggagagtctgatagaacatgtctagcccctgaatcaataagtatggcccgcgcgtataatgaataaagggtcacgcgtgagcgaaataaatcagtttttgttcgaaagcaaacatgacatcgattagtgacagaaaaataatatttttatgacaatgaagcgacaaagaaatgacaaaataaaaacaattatcgacaaataaacaaattagccaacagtaatatatttaaatgaaagtaacggcacgtcattaattgaaaataattaaataataaaaatctatgtataataaattcgaaatcaaatcaaaaaatgaaaataaaaaataagataaagaaacaatatgtcgccttgaggaaaagatattaattatgctagtgtttgtcccgcacagagttaacggctttcatttaaatcatcaataaaacaccgttataaactctgcataaggaaattcaatgttatattataatacaaggaattaataatgaaaaaattaaccctatccgccttaatgtttgctgctttaaccagtttcactgcctatgccgattacactcaacagaatatagatatagatgcagaaatcaccgatttcgtgtctttagttgattcacgcaatgcaaagctgagtagcataacgttaactcgcaatctaaacgactataacaaccccgtttattcatcaactcaaactgttcagcttagaagtgcaaacccagccgataccggggttagcatttatctggaaagcgagccaacgttaatagctaacgagggtgcccaaaatgaaaaaagatttacagatctcagggtaaacctcgatggtcttgaattagaagtaggtgtggggcaggcaactatatttaataaggatgtcgatcttgacctgatcgttaacgcaacggttcctcagaatgctgcaacaggtgaaagatataccggcgttatcccgctaatgctggaatctgctgcttaaccgacggttaattagtctctagtgttaatattaaatagcggagatttcttctccgctatttaaaaatgaaatggaaattatcaccatgaataatggaatggaatccaatggtattaatcgccagtcggatattcagtgggattattttatttaatcttatgacgatgcctttttatgcttgtagcaaagtgctgatcgaacatttaccgccgccgggatttacagctatagatgaagattcatcgaaaagtttattgggcttggtgaatgggaaacatctacctgcgccgcttcattactcatctcaatcaaaagagatttctttcgataaagaaattttcttaaataacggtatcagccatgaaaccatttcagtattagataaattgctcccacagattgcctataatgaatgtaaatcagggtgcgattatttattatccggttatcgggttacattggataaagtaaacaatctattaataattagagataaatcccttgattatttgatgccctcaaccacttggggaatggttcataaccaatcactgaatttacgtgtggcagacaatcattatcgcgccatatcggccaatggtcagggttatatcggccttccctttcaatcctttggatacctgagctggttttataataaaaccgccaatgtacaacaaatgtggcatcagggtgaaacacacaaagggatcgggcaaagctggtatttgcaaaagaatttctcttcgctgtatttacgcgctggccgaaagaatcatctggataacggtgcggccagagtccaaaccctgatctcgcctggactcgatcggtttgtcactttcggaagccaaagttatatggcggagaaaaccacttccgcaggaacattgattttgtacgccgctcagccgggagatttcgatatttaccgtgacgatcagtttatccgccgcttccccgctcagttagggcgtaatgaaatcagctacaaccaattaccgtcaggctattacaacgccgatattcgtttaatcgatcgttctggccgcgaaattagccgggaaactatgccgatcgccaatatcagttttggtggtaatagcggttggtttgccactttcggtcaatctcaacccacaaaatttaaagaaaaaaatcccccaacggcttatctgttacagctggggcgcagctttctcactccgtggtttaattctaatctcagcttgttgatggataacgataaacactgggctgtagacggcaatatctcgcggccaatgtttctgtggagtatggatatcgctccgacgctaggcctgatgagcggcgagcagggttttggtggctacctacggctgagcggtggtaataaaacgctgggacgctggtcaatttcccgctatcaaacaccggatgtttcccgctatacctcaatgggaagcagcagcgcattttcttatggtcgccattttggcccaacggctctgagctacaattttaatcaatcggcgaatcgctctcagcatcgcctgcaaagtgattggcactggcaacgacctcagtatcgtattaatttttcgataggcgccaagaaagagtggcgaaataaccgcgccaatgactacggcctgtttttcaacgccagattaatgctccagcaacataatattcgcctgaccagtatttatgccaataagcagttaaccaacggtattgattatgatcattaccgccaaaatgatgacggcggctccggtttaagcctcaatagtaccctgagtggcaaaaaccatagtatgagcagcacagtatcccggcagggctcccgaggtaatttgtccatcgatgtgggagcgaacaatcaaaccatgttcggcggccttcgttacagcggtatgttcgcggccaatactcaggggattgctttggggccagccggctccggtggcggagccatgctggtcaccacgccggaaattggcgcgccttatagctttagagttcaaggtcaaccggtcaccggcggcagtacgaccgctatacccgtgccgctttataaccaccagagctttgccgacattcaaaccagccgcagtgatatggatatgcatattaatctgccggtcaacataatgcatgctcatccggggcaggttttctcggccaaagccgatattcaactcactctgctatacaacggtttctttagaacccaggaaaaccagccggtctccggcaccattgtcgaaaccggcgatgaggttcatcccaacggcctgttctctatttcttctggaaaagtattgaaatacatcaaggtgaaaaatgaaaccggcagttttctgtgtgatttaagccaacaacgtaaccattactatctttgccacccaaactagccattggtttcataattatggccggcttcatgaataaggaaataacgatgcctcgatatttatcactctccctactcttgcttttatctgctagcaataatctggcctttgctaatctcatcgcagacccaacgcgcgtgactgttgaaggaatacagaaatcacagaagatccgggtctttaacagtggtgataatccactgttcttggaggtttctttggtcaaagtggagaaccccggcgaggctaaagaaataaaaacgccgattggggaaattaaacatccagagatgatttttaatccaacccgcgtcaccctggctcccaatcaggaacgcgaggtttccattatcccgctcaagagccctcagcaggaaacgctttatcggctgtatctcaaaccggtacacaacctgaaagctgccagccattcgacagagccagcaaaagatatcagtgctccaatggttatcagcgtgggttatggcgtattgatacaccacgtaccggaaaaagcggcacagttgaagggggaggagccttacatatgcgttaagggtaacgtccaactcatagcaaaaggcaatattcaccgcaaattcaccgacctaaacgatgcgtcggcaccaaatgacaggggggctaaaaaagaaatcataagcagtaagaatatctatcctggtgttccttatcttactccagtgagaaaactatcaggaaaggtggatggcgagacaattaactatgactgcgaatgacagcattctgaccttactattatcgtcaatattaatagccttaccgttcgaaacgatcagcgccattgatttacgcccgcacattgtaaaagtagaggctgaggagactcacattgaggtaatcaataccggggaaagcacccaatacgtagccattgaattatatcgcctgaataaccccggtgttccgccagagcaagagtctttaactccgctaggcatgatcgcccaaccattattattcgccgcgccaatgaaattaacgctgggagccaatcagagcggaaaaattacgctaaaagcgctcggaaaaccgactaaagagcaggtttatcgattgagcgtcatacctaagcagaatctgaaaacgcagggtgaatctggctcagtgattggcgtgcaaatcgcgtatatggggctgattcgacacctgccccaaaagccagaatcgcgctggcatcaccgctgcgacgcagaaggcgtgacattgtataaccggggaaatatccgccagcgctggcaaaatttatcgcccaataccgattttaatctctatcccaaccaacagcggcagctcaagggacgtgaagtaacggcaacagtcgatgggcaatccgttacgcttccctgcaaacgtagcggagaataggaggttttatgaagattcaccctgttcaattcgcattattattttttacaatgtcatttccggcgatagctgccaattctattcccattggggatattgatgtcagcgtggaaataaccgaacaaccaaaaatcattattgagaaatgcaacggggagcggctcaacaatataagtttaaagcgctctctgaagccggaaaaaagaatctatcacgcgcaaacctgtgttgctgtaaaagtccggcgtgtgaaaggagggggaggattcagagtctggcaacagcagccacttattttacagaaatcccaaaataaggacggtgcaaataaagcattctcaccggcagaagttcgctggggcgattactcagcatccttacaaatcattcccgatgaaaaatcccccccacttatcttttacccgaccaataggttcgggggatggaataccgatacttataccttagatatttcggccaaaccgcccgtcggaagtcataccgcaggattatatcaaggggttttaagtttgatttttgagacggaatcataatattcctactaaatatgcatacatcagacagggaagaatgatgaaaaaaactgcgaattatcgaaaattttgctgctgcgtaggcgcgctggcttttacttcgacagcggctgtggctcaaattgccacaacagtaacgccgctttcccatagttataccaattgtcggatggcgctcagtctaaataacagatttattaagatcagttttcacgcctttgttcatgacgttaaattaaaagaaattctacgcgacaggtttaatctaaacgaggacatacccatcccagaccaaccggaagctacggtactaaatttattttttttcgacgaggaaggtcataaagacttagtgcaatacaacatttcagaaagtagcttaaacggcgaacaacccaccagatttgaagaccacaacaaacttgtctttacgcacgatgtgccgttccagcaacaaatgaagattacgctcgaaacccccaccaaagatctaaagtatttggccgttaatgcaactttgggttaccagtattccgtcggtgataaaatctatcggttaattgatgagaatgccgttacctttgggcgcgatggaaatacctgcgacacagttaatatccaaacggtacaagctccagcggcattatatgtcgatcctcagttcaagctgaattccgccgtctggcaactcaagcctattgatttatatcggctcaactcacataaaaaaaatgggctaacggctcaaatgatttatcccataagaagtattctttgcctgaattatccgccattaggaatagataatccgagctataccataacggctaccggcaaaaatcccacgcagtcgaataaccattttagcctgatgaaagactccgataagcagatccactatgcggttgagctagaggataacactggctccagctttacactgcccggttcctacaccataaatctcaaacaacaaactccaacgggaggcggctggaggaaaaaaatctgctggtcaccaagaatcacgctattcccgactgacagtaccgaacagggcctttattccgatacattgtcttttactattacgccgcactcttgaccgacgagcgtctaaactgagcgaaaaaggctcgataaaaccgagccttcgaaggaattatccccccagataagccgaacgtaccgcttcattggctaataaagctgcaccggtatcttccagtacgatgcgcccgttttccaacacatagcctctatccgccagctttaaagcctgattcgcgttctgctctaccaggaagatagtcatgccttcctcacgaagttgctgaatagtatcgaagatctgcaaaataataatcggcgccaatcccagagaaggttcatccagcaataacaacttgggctgactcattaaggcgcgcccgatagccagcatttgctgctcgccaccggacatcgttccggagcgctggattcgcctttcgtgcaagcgcggaaataaatcataaacacgctcaatacgttgctgatactgctcacggttggcaaagaagccgcccatcgccaaattttcctccaccgtcatgcgagaaaatacccgccgtccttcaggtacgatagcgatagcctcacgcattattcgtgcggtttgccaatcggtaatctcccggtcgaggaaatgaatagtgccttccgtggcgcgaggttcgccgcacagcgtgcccaacagagtggttttccctgccccatttgcgccaatcagcgtgacaatctcaccctgttgaatatgcagacttacctgatgcaaagcctgaattttgccgtagtgggctgaaacctgattcaatgacaacatattaagcctcacccactttattcacccaaataggcccggatgacatccggattattgcgaatttccgccggagtaccctgcgccaacggcgttccctgattcaccacgtaaatgcgatcggaaatgcccatcaccagcttcatatcatgttcaatcaacagcaccgaaacctgatgatgatcccgcagttccataatcagttgattgagctcgtcagtttcttttggattcaagccagccgctggctcatccagcattagcagttccggccgcgtgaccatacagcgagcaatttcgagacgccgctgctgaccataagccagatttcctgcctgccgattagcgaacgccagtaaaccaactcgttccagccatgtcgcggcacgagacagcgcgtctgcttccgcccgacgaaacgccggtgttttcagcaatccggcaaatacgccactttttaggtgctgatgttgtgccaccagcaggttttcaatcaccgtcatttcacggaacaaacgcacgtgctggaaggtacgaatcacccccattcgggcgatagcctgacccggtaaaccttcgagatgacgatcacgtagttggatgctgccaccggttggacgataaaaaccagtcaagcagttgaaaattgtagtttttccggcgccgtttggtccaatcagcgaaacaatttcaccttcatttagcgttagcctaacgttattgaccgccagcagcccgccaaaacgcatcgacagcccttctacccttaacaaaggttgcgcattcatgcctgctccccctgtttttctttcgcatcagctacttttaatttcagctctgggcgtttcattggtaacaatccctgtggacgccaaatcatcattaacaccatcaacgcccccagtaacaacatgctgtaggcattcaaatcacgcattaactctcgcgataccaccagcagaatcgccgccagaatgactgcaaattgcgagcccataccgcctaataccacgatggcgagtacaaaagccgattcgacaaaggtaaaggactctggactgacaaagccctgacgagcggcaaacagcgttcccgcaaaaccggcgaaggctgcactgatggtaaaggcggtcagcttgattttggttgggcttaaacccaatgagcgacaggcaatttcatcttcacgtagcgcttcccacgcccgccctaacggcatacgtaacaagcggttgatgataaatagcgtcagtattaccagcagcagcgctaccagatacaggaaaataatacggtcaccggggtcgtaagccagaccgaagaaattatggaaggtatcccaaccgccatctttggtcgtacgactgaattccagaccaaacagagtcggtttagggatctggccgatgccgttagggccgccagtgatttcagtattattcaacagcaaaatacgaacgatttcgccgaaacccaacgtgactatggccagataatcaccccgcagccgtaatactgggaaaccgagcaaaaagccgaacgcggccgccaccagtcctgccagcggcagactttcccaaaatcccagaccgtaataatgatttagtagcgcgtaggtatatgcgccaatcgcgtagaacccgccgtaccccagcaccagtaagccagacaaaccaaccaccacgttcaaacccaggcccaacatgatgtaaatcagcgttagagtggcgatatcaaccgttccgcgcgataccagaaatggccagaccaccgccgctacgataatcagcgcagccaacagcttttgtctggtggttgtcgcatcaaagctcggtaaaacccagcttgggccagagatcttcttcatgccttgttgcattaacggccgaaataactggaagaaaaacaccacggcacaaccaatggcgatccacatccagcgcacttcacccgcgccgtgcaccaccaaacgcgtgccgtccagcgccaattgtagccccatcagaaacgaggccagcaccagcatcacgaaagtagagataatcgcgttgacgaagttaagttgcttcatactttctcaacctccggacggcccagaattcctgtcggcattaccagcaatacggcaatcagcagcgcaaatgaaactgcgtctttatattctgtactcaaataagctgaggtgagcgcttcagctacgccgaggattaacccgccaatcatcgctccggggatactcccaatcccccccaataccgccgcagtaaaggccttcattcccgccataaaaccgatgtaggggttaattacgccgtagaattgtcctaataacacgccagccaccgccgccatcaccgcgccgatgacaaaggtcagggagataaccctatcggtattaatacccagcaggctggccattttcagatcttccgcacaggctcgacaggcccgccccatacgggaataacgaataaaaagcgtcagcgccagcatggcgaggaaagtcacaatccagatggtaagctgcatcgtgcttatcgttgcagcaaaaccgttgctttcagccagcgtccactgaccagtgaccagactaggcagagccaaatctcgcgatccttgagtcaggctgacatagttttgcaaaaagatagacatcccgattgccgagatcagagcgatcaagcgcttagagctgcgtaccggcttgtaggctacccgttcaatgctccagccataggcgctggcgatcacaatggccacaacaaaagccgaaccgatcaacagccaactggcgtcaatcccaaccatcattagggcggctataacgataaaagagacgtaactaccgatcatatacacttcgccgtgggcaaagttgatcatgccgataatgccgtacaccatggtgtaaccaatcgcgatcagcgcataagtgctgcccaaggtgacaccgttaaacatctgctgcaaaaagtagagaaactgttctgacatagcctaacccttaattctcttgcctggccgcccttcccacccgctccataccaatgatggcaggaaacatcccccggagacgggggatacattgcgggtaaaggggcctgattgccatcacaggcaacctcactgctgaatatttcgtgagtggttatttgacggcggtagaagaaccgtcggcatgccattcaaaaatgccgaattcgaaacctttcaggtcgcctttttcatcccagcttagcggccccatcacggtttcaaccggcttaccggttttcagatctttcaccaaatcggctggctcctggctaccgctacgttccattgctgtggttagcgattgcaatgccgcgtaggtagtccagacgaatgggccggttgagtccagtttcttggctttcagcgcatcgacgataggttggttggcaggaacctgatcgtaacgtttaggcagcgttaccaacatgccttcagaggcggcgccagcgatattggaaagcgaggagttacctacgccttctggccccataaagcgggtggccaggttagcctgcttggcctgacgtaaaatttgccccatttccgggtagtaaccgccgaagtaaacgaagtcgacgttttctttcttcaagcgagccaccagcgttgagaaatccttatcacccgcggtcacgccttcaaacagcacgacgtcagtgccctgttttttcaggctgtcgcgaactgagcgtgccaaaccttcaccgtattgctgtttgtcatgtactacggcaatacgttttggcttaatagtttcgaggatgtatttcgcagcggttggcccttggtcagaatccagaccggtggtacgcagaaccattttataaccacgggtggtcaaatctgcgttagtagccgctggggtgatcataatcacgccttcatcttcataaatatctgaagcaggctgtgtggaagaagaacaaaggtggccgataacatagcgaataccatcgttaatcactttgtttgccacggcgaccgcttgtttcgggtcacaggcatcatcatattctacgccaaccagcttatcgccgttgatcccacctttggcattaatatccgcaatagcctgacgagcaccggtaaattccatatcgccatattgtgccaccgggccagacatcgcaccgacgatagccaccttaatatccttcgctaacaccgaatggctcattgccataaccatacagcccgccagcaacgccttactttttgtcaatttcatccgcgcattccccatctgtcattgtgaacgtactgttgtgtttgccgggccaattcatcgctacttttagtttttatccataagtaataatgatttagtcttttatatggcaatattttctaataagactttatttttcagaccattaaacaggagttttatgctgcaaatcaactcagacaagcagaaacaagcggtgcaaacaagataaaataaggtgctatttgtagggtatttgcacaatcgatagtgggttgtgctggttatcattccatttactaatttttaactcggaaaatgcgcggcgtgaaaaacattttccgccgttcacgtacagaaaaacttacacatgcgcttcctctcagatccagtacactatccctctactttttattcggaatatccccgatgaaattgaccattgagcgcttaactcagctatcacatcaagatcttatcgatctggcaaaaatctggccaaaacagcaacccgccgactggcagagctggattgatgcagatcggccgctatttgccgcacgttttaaccaaagattgctgggagcagtgaaagtccggctgagtgcagagcgggcggagctagaagatttactggtacgggaagtgacccgtcgtcgcggcgtgggattgtatctggtagaagaaaccctgcgtcaactgccagccgttcagcactggcagttgagttatggcgaggtccctggtgttggacgctctgaaatggaacaatttatgctcgcctgtggttttcattctggcgagcagggctggcagcgttaaagccgctggcccatccgccatacggcggccacgttgcgtgcagtaacgcgcagattttcctgcgcttccgctaacgcctcgggtaaagtcacaatacggtttaccacggagaataccgcatctaaaccgtattgatgtactacctgatagtcctgagtcatacctcccgccagagcaatagtcggaattcctagcgctttggcggtccgagccacgccaattggcgttttaccgtgaattgtctggctatcaatccggccttccccggtaatcaccagatcggcaccattcatggcctctgctaaccctaatgcctgaataacaatctcaataccgggtttaagctgtgcgttgagcaaaccaaacaaagccgcgcccataccacctgcggcaccggctcctgccgtttcgatcactgaacgtcccgtcaatgcgtcaatgtgctcaccgtagtggcgcaacgcgccgtccagcgtgctgaccatctcaggcgttgcccctttctgggggccaaatacagcagaagcgcccttcgctccacacagcgggttatcgacatcacaggctacgatgatctcggtctgagccaaccgctcatccaacgccgataaatcaatatgatgcaatcgacttagcgccgcgccgccgccgggcagcgcttcgccctgagcatcgagaaaatacgcgcccagcgcctgcatcatgccagcgccaccatcgttggttgcactgccgccaattcccagaatgattttacgcgcgcctttatctaacgcagacagaatgagctggccggtgccaaaactactggtgtgcagcggattgcgctgttcctgccgcaccagatgcaaaccggaggccgccgccatttcaatcaccgccgtttcaccgtcgcccagccagccgtaaaaagcctgcaccggctgactcagcggcccgctgacttcaacctgaataatatcgccaccggtcgccgcgaccattgattcaacggtgccttctccaccgtcggccatgggtaatttaacgtaatctgcctgcgggtaaatctcgcgaaaaccttgttcgatagcttcagcaacctgcattgccgtcaggctttctttaaatgaatcgggcgcaataacaattttcatcaaatacctcgttaacccgccaagttaaatacgccgaacatcagcgtggaaaccagtgcaatggtgaagcccaccaacgtttcgtatggcaacagtttcaaacgctcatgcacctgcatattgacgctgccgccggttgcatggaagaaactgccgtgtggcatgtgatccagtaccgtcgcgccagcatgtaccatggctgcgccagccagtgccgttacgccaagatccaacaatgttgaactgaataccgccgaagccaccgcggtgcccgccgtggttgacgccgttgccatcgacatcagcgccccggaaatcggcgctaacagataagcaggcatacctgatgccgttaatccttcgatcagtacgtcttttaggccggaatgagcaataatgcccgccaaagtaccggttcccagcagcataatggcaaccggtgccatgcgactcaaaccggaaatcatatagcggttcgattcgcgccagcgccccatgatcaccgcgccaaccaaaccacccagaggcaaagccagcaacggatcgatggtaacacccgcaattgggcgcaaagccaacagcgcgatagccactaatggagccgaaatcgcagcggtaaaggacggaagctggttggtttcatgcacaatcagctcatcggcgttaaccttgctgcctttgtgtttcagatgcttagctaaataataggccacaaccaggccaaacaaaccggggataatgccggcggccatcagagaggtcagtggcacatggaaactgtctgcggccgcaatggtatttgggttcggagacatcacgttacccgccttaccgccgccaatcatcgccagcagaatagccattttggaaatatcggctcgatgagcaatcgccagagcaataggcgcaacggtaatcaccgctacatcaataaatacgcctacggcggttaacagcatagtcgctaccgccaaagccaacagcgcgcgcttctcacccactttgcgcacaattgtttctgcgatggtatttgccgcgccggattcaattaacactccggcaagcacaccggccgccaaaatacgcagcaccgcattggtaatgccctgagcgccgctgatcatcaggctgacggtttgaatcagatccgcaccaccgactaacccaccggcgagcgcgccagccatcatgccgtaaaccggcggaactttacgtaatatcagcacgatggagacaataagtgccaccagcgcgcctaaagctgaaaccgttgtcatgttctgctcccagtgtactttctaattttatttttcagggtaaggagccggcattatgtaaacttcaccggagaaaggcatggtaggattgaccagaaaataactaggataaacgagatgtaattgtagaaagccacaaatcagccgtagatttgcagaccgatatacaagcgcaacaaagaaggtaactgattgatttttaaacccgttatttcttctattttttgcaggcgatagcgtagggtattcacatgaatatgtagcagccgggctgattgagacagatcacaattctgatcaaaatactgttgcagcgtctgtcttagtacacctttaccatccgcagcgcaaagctgcgcccaactggtgcccaattcctctgcctgccaagtccccgcaaactcccctaacaacgccggtaaagagtaatcgttgtaatacagcgtcttatgccttaaccccagccgttcagccattccctgcgccgcacgagcggtgagataagagcgacgaataccttcaacgccggggaattggccaccgacaaaaatgcgcacatcgaaacgcgcctgaagctgagtcacaaagggctgaagctgcttatttaaaggacgcgacggcttatctccagcagccaacgccagcggtttgagcatcactaattggttaaaaccattcatgctaaccagatgatcacgaccagtcgcatccagcacatcaataagctggcgcagagattcatgatctggctgattcagttggataatcagagcgatgcgcggcaaggttaaattcagccccaaataggccgccattgaacctattgatgtgtcttgctgatactcagccaataattggctgactaactcttcccgatagcgtttttcccactgggtttgttccagcaaggcggcctgttccagaatcagctctgcagccattcgcactaactcggcataagcgcgaacctgcgccggttcaccagaaatgccaatgacgcccaccaactgctggtgaaaaataatcggcaggttaattccgggtttgactcccttcaacttggcagcagtagcacaatcaatttctaccactcgattttccattaaagccagcaccgccccctcatggcgctgattaaggcgcagcggatctccagaggcaataataattcccttatcattcatgacattaaccgagtactggatgatactcatggctcgctgaacaatctgccgggcggtggtttcttcaagatggttttgacgcatgggcttcctgtctggaaacgctggagaattaagggaaaacaagtattacgatagtgtacggaaatccaaacgccgttaccgataggcgtctcaaaaaaccgaatattgaaatgaacggatggcagttaaaagctaattcggaagaaaatcatataaaaaatattgatgaaaaccagaaaagcaaaagggcgataaataattatcgcccttttctgtctttacgcggatgttgctcttaggcttcgatagccatgcgtaactttttcatcgcgttcttttcaagctgacgaacgcgttctgcagaaacgccgtacttatcggccaactcctgcaaagtagatttgttgtcatcatccagccaacgggcacgaataatatgctggctacgctcgtccagaccttccaacgcataggtcagtttgtccgctgcgtggctttcccagttatcttcttcaataccatcggcaaaatcagaagttttatcctgcaaatacagaacgggagccatagactgaccgtcgcgtacttcatcgtccggagttgggtcaaaagtcatatcctgcgcggacatgcgagattccatttcacgaacgtctttgctggtcacacccagctctttggcaaccatttcaacttcttcctgattaaaccaacctaaacgctgtttggttttacgcaggttaaagaacagcttacgctgtgctttggtggttgcgactttgacaatacgccagttgcgcagaacatattcatgaatttctgctttgatccagtgtaccgcgaaggacaccagacgcaccccaacttccgggttgaaccgacgaactgctttcatcaagccaatattaccttcctgaatcaggtcagcctgtggcagaccgtagccagaatagttacgggcaacatgagcaacaaagcgcaggtgagacaggattagctgtttagccgcctccagatcgccctggtaatgcagccgttcagccaactcacgctcttcctctgctgtcagcataggataggtattggcagcccgaatataggcttccagactaccttgcggtactaaggctaaagtttgcatttctttggtcatttaaaccctctcatagcatgtgcagatcgtgcataaactctcggcgcgcatattttagcatccggataaccagattcaagcaccgggcaccttatcatttcactgtgctcttcgaccgactaacgccacaaaagttcaatatagatcacagtttcaacgctggatcctagccgataacctgtggatcttaccagtagttattgcctggaaatttgtagaaatggcggtagtcacgatgattatgcttcccctgcttaatcggaaaccgcaggggaagagtatagcaaaaattgcttattgcggtgtaaatcggcgtaaatgttgaacagttgccagccaggcggcgatccagccgatcatggcagaaatcagcaccagcagcagggattcatcccagctcagtccgtgcagagagaaactggtaccgaataccgtcgctacctgcgccactaccgaacccaacttccacaccagtgcttccgacagaattagcgatagaactgcaccacccagacctagcatcgcgccaccgttcaggaatggccgcagaataaagccatctgtggcaccaatcagtttcatcacattgatagtgtcgcgacgactgaaaatgctcaatcgcacgctgttaccgataaccaggaacaccgcaacgaccatcaacacgccgatcatcgccgccacttgcccaaccaggccggtcaacgccgccagtcttgcaaaccagctatcgtccatacgaacttctgccacaccttcaaccttggtgacacgatcccgcagggtatccagcgtttcagagctttggaaactcatttgcggcgtgatgatcgccaccgctggcagcggattctcttccagcatatccagcgcaccgccgaaacctgaccagttgcggaactcacccatcgcttcttcccgcgacagataattcactttttccacgccggcttctgctttcaatgcggttaccacattttccgcagcgttatcgtcaagagacttatccagatacaccgtaagctgtggcgtcgggtaccactgttcagcggcggtgctgacgttcttccaaacgatatagcatacactcggcaacgtcagagaaatggcgatcaccatgaccgtcagcagggtagccagaggctggcgcatcatatcggccaacgcattgacccatgaataacgccactgttcgcgccagccgcctttcaacgctttggtttttgctttctttgcattattcgccatgacgcgctcctgacattcttccctgactgagcgttagaatcgggtaacgacgccgcgcaatcagcgaagtatcgtgggtggccatcaaaacggtcacgccaacacggttaaactcttcaaacaggcgcaaaataccttccgacagggcttcatcgaggttaccggtaggctcatccgccagcaataccgccggcttattcactaccgcacgggcaataccaacccgctgctgttccccgccagaaagctggatcgggaagtttttcgctttatccaataagccgactttatccaacgccgccgatacccgacgacggatatcttcggtactggcaccggcaataatcaacggcatcgcgacattgtcatacacggttcgatccagcagcaaatggtgatcctgaaagatcatcccgatctggcgacgcagaaaaggaacctcgcggtttttcaaccggctgatatcgtggccgccaaaccaaatgtggccggcactaggccgttcgatgccacaaatcagtttgagcagcgtacttttcccagcgccggagtggccggtcaaaaacgccatttccgccgggcgtagatgaaaatctaccccttgcagcgcttgtcggccgcccagataagctttactgacctgttcaaagcgaatcatccgtattaatcctctcgggcaaaaagagcctcaataaaatcgtcagccttaaatggccgcaaatcttcaataccttctccaacgccgatatagcggatcggaataccaaactgatcggcaatggcgaaaatcaccccgcccttggcggtaccatccagtttagtcagggttatccccgtcaggccaaccgcttcgttaaacagtttggcctggcttaccgcattttgtccggtgctggcatccagcgtcagcataacctcatgaggggcatcgccgtccagctttttcattacccggacaatcttcttcagctcttccatcaggtgagctttattctgcaaacgcccggcggtgtccgccaatagcacatcgacgccacgggctttagctgcttgaatcgcatcaaaaataactgaggcggaatccgcgccggtatgctgagcgaccacggcaattttgttgcgctcgccccaaacctgtagctgctcaacggcggcagcgcggaaagtgtccccagcggccagcatgactgatttgccttcggcctggaactgacgtgccagtttaccgatagtggttgttttacctacgccgttcaccccaaccatcagaattacgtacgggttcttaccgctgacatccaaaggtttgtcgactttagccagaatttcggacatttcctccttcatcttgccgtagagtgcttcggcgtctttcaactgcttacgactggcgtgagcggttaaggattcgatgattttacgcgtagtttcgacgccaacgtcggcgatcaggagctgttcttccaattcttcaaacagatcgtcgtcgattttcttaccgctgaataaccccataaaaccagaacccaggttttgtttggttttcagcaagctacgttttaagcgagcaaagaagccttctttcgttggcctttcctgttcttgagccacaggtgccactacaggttcaagctcgatttcgtccaccaattcagactcagcaagcgcagtagtcacttctggctctggctctggctctggctctggctctggctctggctctggctctggctctggctctggctctggctctggctctggctctggctctggctctggctctggctctggcagaataacttcaatatcttccaccgtttcgacagaaatatcagcctctgcttcaaccagagcagactcaggctcgaatacctgcggttgatgctgctccgtcaagaactgagccacagcttcagcaaccagcggctctgctgccggtatcacttcttctgccaatatctctacggattccggttgttcggtcaccgcagcgctaaccggttcgataaccgccgtcgtctcgatctcgttgaattcagccggctctacgtattgagtgggaacaatctcaggctcaattggcgtttcttccaccaacggcactacatcgatagccggggctatttctgccgccgcttccgcgttgatttcgctgtcccattcccccacctccgttggaacaacggattccgctgccggagtaggttcgtcagccgttacaagctcatgctcagaagccgcgggcaggctttcatcaaccactggctcagcgactggctgctcaattttttgttcttctttctgttcttcactctgacggccaagacccagccaggaaaaaaacccacgttttttttcttttgccatttgcgactacactcctcgcggttaaatcatggcttacataaataagataatagctcgccagtctatcactttcccccgagcagcaacacgcgcacgatgctgctttccgttgtgaattcaatcaacaaagcattaacgtttcccctcactgcgcacatcggtagaatagcggctatatcttctattcagcgccgtcaaaatggccacatttcaagcagcgagctatggcaaaaaaaccacaacaacaatccttcgggcagattcgtattattggcggaaagtggcgtggccggaagttaccggttcccgatagcccaggcttacgaccaacgaccgatcgagtgcgggaaaccctgtttaactggctggcaccgatgattcagggcgctcgctgcctagattgttttgccggcagcggcgctcttggtctggaagcgctgtctcgctatgctggagaaaccgtgttgctggaatacgagcgcaatgtggcacgccagctcactagtaatctggctttgctaaacgcagaaaatgggcaagtggtgaataccaacgccctgcaatggttggcgcaaccgggtaaacctttcgatttggtgtttctcgatccgccgttccgtaaaggtttgctggcagaaaccgtcaacctgctagagcagcaaggctggctgaccgatgaagcctggatttacgtagaggccgaagcggaaagcgcggccgcagacgtaccggccaattggcaattacaccgtgaaaaggtcgcggggcaagtcgcctatcgcctgtatattcgtcaccatgctgcgtctgacgcagcgcaggagccagagaatgttgattaatttcggtcgtttactgatgctgggcgtatgggcttttctgatcctgaacctgatccagccattccctagtccgttgaaatattttgtgaatgtcgcgatgatttttatggtgctgatgcatggtttacagctcacgctgctgaaatcaactcagcctaaggatcaaccgattagcggctggcagcaggtcaaaatctttatctttggtgtttttgaactgttggcgtggcagaaaaaacagccgccaatgccgaaaaagtaatttccatccctacgtacttttccaagccaaagctatttggctggctgaacggcggtaaaatcaatatagcgggtgccttgtaaacgcagggtgccctgcataccgatattaatttgttgatattcctgacgaggcaaaacaatattaatttcactgccgctcaggagcgggcgaaaagtcacttcatagcgtttatcttccgccacaatttcttcccgctgacgtgaacgacgattcggcgctaaaacctcacgtttattactaacctcaacctgcaggctgcgcattggagctttatcattctctgcatccagccggcgtttttgccaatactggcgcgtggctaaaataacaatcagtgccacaaccacaataaaaatcagcggtggtttgctcatgaattacacctaataaataaagctgtcgccgttatcagattcagggcttattgcccggtaaataagggaagttcatcacgttggctcccaaatcagagatacgcgcgctacctttttcggtcacgacatcaatacggatgacggaatgaagtggaatatagctacggttgacgccagaaaattcggttttcagtttttctgtcgacggatcaaccaataacgccgattggctatcaaatacaaaatcagcaatctcgataaacccgaacaaagagctgggcgttatttcacggacatagagttgataattcttaccattgttcatgaactgaatgcggtaaagagtttgatcgttcgccatggtgttacctatcgctatccttcgataatcaagctttcaggggaagagaaccggttattaacataccatgaagggcttaaagacgcatccgtgcggttagcgggtttattctgtcgttcgactgtaaatcaggcttgccagcgattgcttagccctccaccggtttacaccattcaccgtgatccatccaatcttcatcagagtcccctttaatccacacttcattgccatactgatgaattaataacgccggcttattttgatcgatattcttcaggtatttattatagacgggatggcggttatttaagatatcggctttgccgtaatgtatcttgccgggatattttcgattatcgacaaaagtgacatagaaattatcattgcgcagctcaattatggcccgcccattcttgaccaacttgcaattataagtaaaaccgggaaattccgcactataggcagcagaacagactgaaagagtcattaccatgataagtaacaatttttcttttttcatttttaatttctggcaaatagcgttcatattaaagtggcagaaataaactgacagctatggcagagtattattattctctaccgcttatataagctcataagcctgcgccaattctcgtatattaccgggttcaatactgttacccattaaacacggggaatattaatagcatctgctcaggctattttctatacttttattaacgaaaggttactttgatgtaacaataaatgctttaattaagttaatatatttatttaaaataattatcacgcttactttagcgtctgtttttcacacactcaagtacgaattttgacctacgaattcacgccgttgcatcacatataaaatcgcatgcaaaaatcattagtaatcgaatagcccctgttgttcatcctgacgatcccctacactgaaaagagacattggctgataattatcgttaccgagcggctattttttgcagaaactttagagaagaaggataaaaaatgagttggccattcctcgctgtatttttttctggttggttgtttgttgatgccagctaccgtgggccacgctggcaacggtgggtcttcaaacccgtaaccctgttactgctggttctactcgcctggcaagctccggtacttgggccagccggctatctgatcgttctcgggctgctagccaccatggctgccgacgctttgctattgctacccagtgagcgcttactttatgccattggcgcattcttcctttctcacctgctgtataccatcagtttcgcgacacagatgacagtcagtattttctggccgctgccgttggtgctgatcatcataggtgcactgttactggcaacaatctggacccggttggaagaaatgcgctggccgatcgcaacctatgtcgccatgacgctattgatggtgtgggttgccggtgaacaatacttcttacggagcaccgattttggcttttcgctgctgatcggcacttctttgctgctgttagccaatattatctggctgatcaatcgctaccgtttttctttcaaagccgctgatgcactggtcgcaggctgctattttgttggtcacttcctgattgtccgctcgctctatctgtaaatatctacgccccacggacggggcgtactggtttcttctttctcctttctgcacaaattcacccgcgcagcaagtccccgtggttaataaatcgaactctatttagcaataattctcatccttctattgactctggagttagctccaaggtgtagagtcctctcatcaacggggaattaactgttccgggggcactatgcattcacatcgcgaccaccaacattcagatgaagttcatgaccacaacaacgaaggtcacgcacatattcatacagccgatacacattgctgtagtgcaacaaatacagcggtcgaagaggtatctcaagctagtaaacactcacattcttccaactgttgcagcagtgccaagcctgatacgtcagggaatgatagcgaattagaagggctacccagcacgggcggtcagcgttatagctggcatataaaggggatggattgcccaagttgcgcgcgtaagattgaaaatgccgtaggcggtatctccggcgtggaacaagccaaggtgctgtttgctacggaaaagctggtggtagatgccaaaactgacgtcagccaacaggtacaaaacgccgtcgccaaagcgggatttagcctgctggacagccccaaatcagggcaaaaaatggcggccaatgaaaataagtttcgcgaatatttaccaataatcgtactgacgcttttgatgttagccagttggggaatttcattagttagcgaagaaagtggccgcatcgcctttatcgtcacaaccgtggtgggattaattcctatcgccggtaaggcactgaaactgattcgttccggcacgccttttgccattgaaaccttgatgagcgtggcagccattggcgcgttatttatcggcgcaacggcagaggccgccatggtattgctgttgtttatgttaggcgaactattagagtcttacgccgccaatcgtgcacgacgaggcgtttcagccctgatggcgctagtaccggaagacgctttgctactcaaaaatgggcaacggagtctggttcctgtcagcagtttacggccaggagacgtaattgaaatcgcgccaggagcgcgtctgccagccgatgcagagctggttacaccttttgccagctttgatgagagtgctttaaccggcgagtcgattccggttgaacgacaacaaggtgaaaaagtggcggcaggcagcctttccatcgacagatccgccgaaatgcgcgtaatttccgagccgggtaataacgccattgaccgcattttacagttaattgaagaagcggaagaacgccgcgcgccgattgaacgctttatcgatcgctttagccgcatttacactccattaattatgctgctgtccgttttggtgattttgattccacctatgttctacggccagccttgggaaccttggatttatcgaggtctaaccctgctattaatcggctgcccttgtgctttggttatctccacgcctgcggccattacttccgcactggcggcggcaactcgtcgcggcgcgttgattaaaggcggagcagcattggagcaacttggcatcattcaaaccgttgccttcgataaaaccggcacgctgaccgaaggtaagcctcaggtgaccgacgtactgccggtcaatggcgtgactgaaaatcgcctgttaacgctaaccgccgccgtagaagccggttcccaccatcctttagctacggcaattttacagcgcgccgcgcaggaatcgacttcgctacctcccgcagaggaacgtcgggcgttggcaggtattggcgtcgaaggggtcgttaacggcataaaaatattggtgagttctccgggcaaactggctccacaatcgctagataaccactggcaaacacaattggatcagttggaaagcagcggcaaaaccgcagttgcggtgctggaagaggggcgctttattggtctgctggcgctgcgggatactctgcgcacagatgcaaaacaggcgattaatgcgttgaaaaatctgggtattcagggcgtgatgctgaccggtgacaatccgagagccgcagcggcaattgccaatgaactaggcatcgactatcgagctggattattacccgcggataaagtagaggcgatcaccgcgctgaataaggctaaacccacggtcatggtcggtgatggcataaacgacgcgcccgcgatgaaggccgccagtattggcgtcgctatggggagcggaaccgatgtggcgctggaaaccgccgatgcagcgttgacccacaaccggctgaccggattagcggaaatcatcgtgctatcacgtgccgctcgcgccaatattcggcaaaacatcgctattgcgctgggattgaagggaattttcctgattactactttgctgggattaaccggtctgtggctggcagtgttggccgattcgggcgcaacggctctcgttaccgccaacgccttgagattactgagaaaacgcgaaatttaaccgggtagaattttatccgaatattgttcactcccaaggctctgcacgagccttggtttttttcctgactaagccttaatgcccttacgcaccagataacgataaggggcagtctccacttcctgtgccaccagttcatgatccataaagcggcaaaatccgggaatatcgcgggttgtggcaggatcgtcggcgataatcaacaaagtctgtccttcttccatatggcgaaccgttttccgcaccatcattaccggttccgggcaacgtaggcccagcgtatcaagggttttatccggatgggcaaaaagatctgtcattggttttctcttatcagcgattgagcaaattttaatctcggcgggaagtgcccgatgaagggcagctagtttactccgcccattttgcggtgcaagctacgctaacgtttgcgctaaaattaaccattgcattcgttgcgcaaacaagtattatgccgccgcgccgtagaaactgcgggcacattttgtttgggttccctcaccccaataaccaaaaaggtcacatctatgttttcgtttacgccccaacagcggatgaccgctttggtatggctttcgctattccatattgtcatcatcacatccagtaactatctggtgcaattaccgatcgctatcttcggttttcacaccacatggggagcttttacctttccctttatctttttagctaccgatctgaccgtgaggatttttggtgcgcctttagctcgccgcattattctctcagtgatgttacctgcattggtaatttcctatctggtttcagccctgttctttcagggaagctggcagggattccccgcgctcactagctttaacgtgatggtagcccgtatcgccgtagccagctttatggcctacgtattagggcagattctggatgtacaggtatttaaccgcctgcgtcagcgcagcgcctggtgggttgcacctacggcagcgatgttcttcggcaatatcagcgatacgctggccttcttctttattgccttctataagagcagcgatccctttatggcggccaattgggtcgaaatcgccttggtagattatacctttaagctactgatctgcctcctattctttcttcctgcctatggtgtaatgctgaatatgctgctgaaatatttcgccagtagaacggcgtcgcagccagcggtacaaatcggctaatctaccacctgccggttaatggcggcccgcctacggccgccagattcttctggaattccgtgtaatacctgcctactcacaattctttaccgaggagcctgttgcttttatccgctgaataaggtgcgatacgggtcattcagtcaaggttaaagactctcatccagaaggaattcccatgaataagatgaccaaacttttcgccgttggtttattggttaccgggctaagcgcctgcgatgtcaaaaacgacaacaacgttggccagccggtgagtttattggagggtaatatcgccctggttctgcccaccgaatttaccgatcaaagcgataaaatcagcagcccttccagtaataaacgcgtttatgcgaccaaaaacggtgaaaaagccgtagtgatcattttgaatgaaaaagacaccgccggtttggatgtattggctcagcgtttgatcgaacagcaaaaaggtcgcgatgccaatctgcaaatcgtcaccaataaaaccattcaggttgacggcaagccgttgcagcaactggatagcattatcaccagcggcggccagaaggcttattcatcggtcgttatgggtaacgtcgataacaacagcatgacgctgcaaattaccgttccagccgaaaatcaacagcaggcgcagaccgaaactgaatccattatcagcaccctgaagctgaaatgaatgcagataatcccgcagcggagttgtaacgctccctgcggggttttctcaccaaatttgagcgccactgcggcgctctgattgtttacgctaacgcgcgagccagtagcgtaatcggatgctcacatttcttgctggtcgacatttcaatctgccatttacaggtttcacaatccgtaatcaccaaatctaccccgctctcctcaatctgacgaaataacgaagcgccaatgccttgcgaagtggcgtaattctcagatttaaacccataagtaccggcaattccacagcattgagaatccagcgtaatcagttcgacgccgggaattcgacgcagcaacgccagtgtataagcagtccagcccattttctccatatgacacggcgtatggtaagcaatgcgcagcggcaggcgtttcagcggtaattcccgcccctgatccagtaaacggtaaagataacgagttgccagttcaacgcgatcgcgcaccggcgtggtatccacatccaataaatgaggatattcatctcgtagagtaaaagtacagctggaagaagtggcaaccaccggaatatcccgcgtgatgaccgcatctgtcagcgattccagattaactttagcctgctttttagcctgatcgataaagccgttggcaatcaaagggacgccgcagcacttttctcgtttgagcaactgcacgccgatattcattgcattgaaaacgctgattaaatctttccccagctgcggatgattgtaattaacaaagcagccgtggaaaaacgccacctgttcggcatattgttgctgtttagccgcctgctgacgataccagcggcggaaagtaccaaaagagtatttaggcaattcacggcgatgatcgattttcagggctttatccagcaagtgacgcactggttttaatccagtgatagcattcactaccggtgcaaatggcgtcgacaaagagcccattaaatcggtatggcttaaaatagcgtcacgcagttttggtttattactgctgtaactggctttagcacgttgaataatgtcgccgattttaacgtcggaaggacaagccacttcacaacgtttacagttggtacaatatttcagcgcttcgtcatacagcatcggatcttttaatcgcagacgttcgccatcaggccctgcctgctttggccccggataaagcggattgaccttggctaccgggcaataagtggtgcataccgtacatttaatgcagctttcgaagctgttatcccgcggcaaactcatagtttaacctccgtggcatcggtaatctgctgagcagcgaacaaagcactggttaatgacacaccggcaccgcagccttgctgtagggggtcatagccgcccaacaccgctccaatcgcataaagattttccaaaggctcgccgccgcgcatagcgcgtaactgcttatcggtctgcacgccgaactgtaggtaaggctgagcatcaaacatgtcgctgcgactccagtccgcccgattactcagagaaagcatatccagccctaaaatgggttcgtaaacccgatcgaatccggcaatcaatccgttgctaaagaaactgccgctcgccagtacgacatgaggcgctcgtagcggaatatctccgtggttacggctatacaagccggtgacacgattaccctcgagttcagctcgtagtaccgaatctcccggcatgactaacccaccaagatgttgaaaacgttggcgtaattcctggtgcagacgcatacccaataacgatggaggcagagtcggcaatagcataatcggcttgccgaccgccagtcgcagggcttccaactgtaccggattatccagaccgatacaggcgggcaataaaatcgcctgagcgtgcgtagacaagcggctcaattcttcagccaagggaggcaggctttccgccaaatccaaaacgcgggcgatattcaccgcgcgaaattcactaggattatcacgcagccgatctaatgccggcaaatgcatatagctggacgtcgccgcgacgccctgcgcctgtaaggaatccgccaccatctgcggctgaaaatcgaggaatccttcaataccgataacggcaattcgctcccaaggtaaagttccgttcaacggtgtagtgggaatttctgcaggactgagccacgttgggcgttgactgcccagcggcgtaatgcgcatgtggttttccgccgcactaccgacaaaagaaaggtggcaacgctccagtaatttctgcgcttcatccaccagttcgatgaccaccgcccccattttgctgtaaggatgctcaggtgcctgtgccgccaaggcttctaatgccgtaagaggctggcgcacttcgctgccatcaggcaactgagccaaaagatcgagagaaccggatgaaaaatgcagcgcactttgcccggcgctgacgatggcgcaagactttccctgctccgccagacgaataccgcaggttagccccgccagcccgccgccaatgataatggcatcaaatttcatcgcttttctcctgcgccgatggaatcgcggcagtctggtgacccagcccgcacagtccttgatatacccaactggtaaattcactttcccgcagcgcatcgccccaggcaattggacggacgcctttccagcgctcgttgaggaattgggtcagttgctcgcgagattgctgtggcgtggtgacattaaaacgatttagtaagccagcggcacgacaggcgcagagttcaccctgacaggttcccatcccgacgcgagtgcgtcttcgtaaatccaataaattgtttaccgtgagcgattcgacggcataacgcacttcacctgcggtcacagcttcgcattcgcataccaggctattatccagccgattaccgtccaataattgagtggctctatctccgtgacgataaaccgcagagccgcgaatactggctggcagagaaacaaccttacgtaaagtctgttctgcggactggcgagaaccgggcagcggctcttgtgccgtggtgcaactggcctgatgccccagtttttcacacactttatccgtcgcccattctgccattaaccggtaagtcattaatttgccaccagtaatggtgataaaaccctccagcccatcgcggctggcgtgatccagcaaaacaataccgcggctaacgttacggccgctcggatcgtcgtcgctggcgaccagaggacgaacgccagcataggcgcgtaaaatgcgggttgccgccagtttcggcgacagtttcgatccttcccgaatcaaaatatccacttcctgtggcgtgacgatcatgttgtctatctggtcataatcaatatgcgttgaggtcgtaccgatcagtgaaatagtgtctcccggcactaaaatatcggcgtcggccggtttgcggcaacggttaatcaccatgttattaatgcggtgccccaaaatcagtaacgcgcctttcgcagggaacattcgcactcgcagatcggcatactcggcaatgtgttgcccccaaatgcctgcggcgttaaccacgattcgggcatgaattttatactggcgctggtttttgtgatcgaaaacgctcacgccggtcactcggtcaccctgacggataagaccaataacttcatgatatgtcagtacattagcgccatgttcgcgagcgtccagcatattggcggcggtgagacggaaagggtcaacggtgccgtcaggtactttaactgcaccaatcatggccggattggccgccggttccattcgcagcgccaacgccggatcgatcgcttccgcgtcaatacccgccaactggcagcgggtgataaattgctgctgatattcgagagaatcttctggcagcgtgataaacaagccattggttggttcaatacagtggcgggcaatacgtttgaggatacgattctcttcaatacattctttggctgattcgccgtcggttaccgcatagcgcgcgccgctgtgcagcaagccgtgattcctgccagtcgcaccggtagcgatgtcgtgtcgctccagtaaaatacagcctaacccacggcgggcgcagtctctagctatgcccgcaccggtggcgccgccgccaatgatgatgacatccgtttcgctgtaaggagaactgttcgtcatgaaagaccccactctatagacaaccgcctggcggtcaattttacatctattgagacacaataattagggtcattgtttgataaggaacaaaaacgaaccaaaaacgaaaaccaaatgatggataaaaaccatgattgtgatcaaagtcacacaggagcacccactttttatttcaaatcgttaaccaatcgctcaaaatcgcacccgcttacataaaactgtaacaattgcgccatccctcacagataaacaacgcgtttttatctagcattgcgctcgttatagaacataaacgataaccaggttggcagttcaaccacccgctagacaccaggctatgctgggatcaaaaagtacgtataacgccattggaggcactcatgttgagtatatttaagcctgcggctcaccaagcccggctgtcagaagatcggattgatccgacttatcgccgattacgctggcaaatatttatgggcatcttcttcggttacgctgcctattatttggttcgcaaaaactttacattggccatgccgtatttgatcgagcagggcttctcccgtggggatttgggttttgccttatccggtatttccattgcttacggtttctctaaatttatcatgggttcggtttccgaccgctcaaacccacgcgtgtttctctccgccggtttgattctggccgccgccgtgatgctgtttatgggctttgtcccttgggctacctccagcattgccgtgatgttcgttctactcttcctgtgcggttggttccagggaatgggctggcctccgtgcggtcgaaccatggttcactggtggtcgaagaaagagcgtggcagcatcgtatccgtttggaactgcgcccataacgtcggtggtggtctgccgccattgctgttcctgctggggatggcctggtttaacgactggaaagccgcgttatatatgcctgctttcggtgccattttagtggcgttgatcgttttcggtctgatgcgcgatacccctcaatcctgcggtttaccaccgattgaagagtacaaaaacgactatccagacgattactcgaaagaagcagaagaagaactgacggctaaacagatcttcatgcaatacattctgccgaataaattgctgtggtatatcgccattgccaacgtattcgtatacctgctgcgttacggcattctggactggtcaccaacctacctgaaagaagtgaaacacttcgctctggataaatcctcatgggcctatttcttgtatgaatatgccgggattccaggaacgctgctgtgcggctggatgtccgataaagtgtttaaaggtaaccgcggtgcaaccggcgtgttctttatgatactggtcactattgccaccatcatttactggctgaacccggtcggcaacccaggcattgatatggcctgtatgatcaccatcggcttcctgatttatggcccagtaatgctgattggtctgcatgcgctggaactggcaccgaagaaagcggcaggcactgcggcgggcttcaccggtctgttcggttatctgggcggatcggttgcagctagcgccatcgttggttataccgttgacttcttcggttgggacggcggctttatggtgatgattggcggcagcattctggcggttctattactgatcgtcgttatgttcagcgagaaaaaacatcacgaagagatggcaaaaaaccgcgctaactaaggctcggtagtcaatctcagcgtttcaggccgtgccgttatctttggcgacacggccttttttgtaccctaaaaccaaaagtggagtaggtaaaccatgcaaactcacgttaaagccttggtagctggcattattctggcctcatcaatggccggagtagctcaggccgcagagaaaattgtcatcgcacatcgcggtgccagcggctatttgccagaacataccttaccgtcgaaagcgatggcttatgctcagggagccgattacttagaacaagatttagtgatgactaaagataatgagttggtggttttacacgaccattatctggatcgagttaccgatgttgcggagcgcttcccagatcgggcgcgtaaagatggacgttactacgccattgattttactctgccagaaatcaaatccctgaaattcaccgaaggttttgatatcaaagacggcaaaaaggtacaaagctacccgggccggttcccaatgggtaaatccgatttccgtgtgcataccttccaggaagagatcgagttcattcaaggattgaatcactcaaccggtaagaatatcggtatctatccagaaattaaggcgccgtggttccaccgtcaggaaggaaaagatatctctgccaaggtgctggacgtgctaaaagagtacggttacaccaccaaaggagacaaagtttatctgcaatgctttgatgccaatgaactaaagcgaattaagaacgagctggaaccgcaaaaaggcatggatttgaaactgattcagttggtggcctatacggattggaatgaaacctatgaacaacagccaaacggtaagtgggtaaattatagctatgattggatgttcaaaccgggcgcgatgaagcaggtcgcacagtacgctgacggtattgggccggattatcatatgctagtggcagccgaatctacgccgggcaagattgtgctaactgagatggttaaggatgcccacgccagcaatatgatggtgcatccatacacgattcgcgccgatgcgttgccgaaatatgccaccgacgtcaatcagctgtacgacattatctacaatcaggcgcaggttgacggtgtgtttactgatttcccagataaaggcgttcagttcctgcaaaagcaggggcagcataagtaaccaaaatatcagggcgcatttttatgcgccctgtccatcaaaaataagccacttgctcttttgcttgaaagatctgagctaaatagcccttaaactgttcggtaatctgttctgccgcatcattcatatctatataggtggttgccagcactagcccatcagcgacagaaaatatcactttattgccgtagttataggacaaaagttgtagcaaacaatcgtattgctgaggcactggagcaaacgggcaaatcaattctgcgttatcatcctcagtatcaatataaacaataaattcgtcatttatattaatataattatcttctccatgaggagtggtggcaaaatattgaagtagtaattgcgagctttcatccatgactgtacctatttattataaggagctaatccacgaagttgcttaaccaggtctgtatcatcgacccgttttacggcaacatttttgattttatcaaaagctttactcccttcggtatgcatattagcggcttgaatttgaaggttactgctatttaatgcgaccattttataaagtgctttcccatcaaccgataattccctactaggagagagcgaatggttaaaatgtaatgatgccaactcacgcttaacttctatatcaagtaaagccgtgcgatctttaccacttttacaattccaacaaggcgtcacaccaatagcattggaaagtaacactattcgcctgacaaatttatagggatcaattttattagagtaagatttatcatgccacatttccattaactgcctcgacagttctctaaccaattttatattattatcatccggtttatttttcgtattaataagataatcgcccacccagccgcctggtttagagatgtccagctcatcacctagcattaattttatagagggttcattgtattgatttgaaacctcccaagacttattctttggaataccaaatccattagggaatataggtagaaaggccattgaattaacgccaaagttaaatgcggccaactgtaaattcattttaatttcttgttgcttcccactcgcgtcgcgtatatataaaactaatggcttggattctgacaatgttttccaagcgcccatctgtatcgttaactgagtcccttccgtgtccttcaaaaaatcctgcgccgtcagtaagctagtagaagttaaccgcaaatcaatcgtctctccattcagagccttttgcagcttttctggatgctggaacaatgcggcaagaacgacttcgcgtccgcgttcaagcgctatcgattgactgtcttccttgctaattttcacgctatgcggaccaagagaggcatgtcgaatcccctcgagcaaaatctctggccgcccgttcttctgtaacgaaaacttagacacccacaaattaactgcgtgctgagaattaccgctatcagcagaacaaacgccaccatttttataactagtggggaatatgtcatcctctccctgctcaagtttcaattgaccggcaggtattgactcactaataaatttgcatcccaaatagtcaaactgagacttttgtatattccactctgccgtattcaataatctgatactggcttgtttaaattcccgcttagcattctctttggctaacttagcgttcattccttgttctttataaaattgagtgagaacatccataacttctttcttacagtgtttaatactgtcgtattcagcattgctaatgggctggttttctaatgacgtaggattttttaaattattctttttaaattccaaatccattgtggcttctaactttccataaaaaccattggaatcatcatctttcaaaacatccagagccactttgatataatctaattttaattggcgagtgtctttagcataattcaatatatgatctgaaaatgaactttcttttgatttatctctggcatgtttttttatcgtcatgcttttttgttcaaatttatctatcgctttatctttcgcctgtaggtcaccctcaccgtttcttatataatgttgacaaagaatatccacaatttcattctcgtgctgtgtaacactaatatcattagtaatatcagtcgatagttcgaacgatggttctatatctcctaattcttttgaaatggtatttatctttttgataaaaggcattttttcgagagaatagccagtggcggatttatcattatccgggatcaacacctcaagagctatatccgcatatctcaactttagctgtctgattgaactccttattgtatcaaccgactctgatttcttctgatggatatagctaacaccagcaatattttctggcttacgcggaggtgaagaaccaaaccctaatattttcttgttctcactcttttcaactttatcatatgaatgattagatttagttacattattatttatcgcaaagtcgtttgacataggacctccacacatcaataaatgcaaaacaaactatattgcagttaataatgtttttttggttcgagtggaggatataacaaaacaattttataagtactgagaagggaaagaaattcagggcgatagaacatcgccccgtttgagcgttaggctaaaaacattttacgcagatagtgcggtactgcgtcgtcagcgtttgaacctatcacttccagatccggtaaaatatctttcagacgttggtgagcatcacgcatgatgcaacccttaccggccatcgacagcatttccaaatcattcattccatcaccaaaagcgatgcattctttcagtgaataaccgataattttggatacctgctccaatgcatggcctttagacacaccgccgcccatcacttccagacaggttgggaaggaaaaactgacgttcacgcgatcgccccaacgagcattgatggcttcctccaaaatcagcagcttatcgtgatcttcgcaggtgaaatacaccttgcacacgccttcggtcggcagtaatgcaggttcgaatagctgataggtgaacaccgattcacggaaaaactcttcctgctccggactttcgcgattcatataccaatcgtcgtttaaataaacgttggtcagaatatccggattatcgtgctccatgctgtatagatcgcgggcgatatcaccatccagattatggctaaaaatcagctctccggcggtgttatgtacgcgcgcaccgttagaggtaatcataaaggcactgatctccagactatcgcgaatctgtgacacatcaatatgatggcgacctgtagcaaacacgaaatgcacgtcacgttcggtcagtagcttcaatgtctctttagcgtaaggagtcaaaatgtggtcaggggacagcagggtgccgtctaaatcggaagcgacaacatgatacatagcggtatgttctaacctctggtggagttggcgtcagcgtcgacgctcagttgatgatgttgcgcaaaaaaacgcaatatggcgcttaacgcctctacacgcagcttgtcccgctcgaacaggatctcatggcgtgctcctttgatgactctgggagcgcccccgtcacagggatgcccagcctgagccattacctgacaaaaagcgtcctgagccgggtttgataccacccgatcttcactggcctgcaacaataatattggcgtggtgattttatctgcctcggcgattatctgctcgctggcacgcaggctttccctcacccagtgataggtagggccgccaacgcgtatttctggcgtatccgcgtagtgacgtaggcagcggcgatagcgctcgcgactgtgggtcagcatattcactacataaggcaatggccgccactgaccggtgccaatcgcgtagtaatcccgcatgttctggcgcttttcggcccaatcgacaatgcggtgcgccagccatttcggcataggtagatgaatacccaacatcggtgcacaaagcgccgcagcatcaaacgccgtcggttcccgggccagatagcgtagcagaatcgcactgcccatcgagtgagccagcgcaaaacgttctagataatggctattactgatttcccgctcgacccactgagcaaaatcttccacatagtcatcaaaattaacgacgtggccacgattaggatcttctagcattcggccagaacgcccttgaccacgatgatccagcaccatgacgtcataaccttgctgaaacagatcgtaggcaacttccggatattttacgtagctttcaatgcgacccggaaccaacatcaccactttgttgtgatgaggggaacggaagcgaacatagcggataggtacattatcgacgccagaaaactcgtcttcttcccgctgctgccagaaatccagcaaaggcccgttagcaaaggcggcaaatcgcgcttcacgggttaaccagttttcagtttttttctctaacggcatagggttgttaattgcatccttaaaccggcgtcctgtggtttttccgagctatagcagatctaaaaacaatagcgtattgtggcataaatttactcattcagggaattttgccgatgaccttcgactggtggctaacctatctggtgacaacctttatcctcagcctgtcgccgggttctggtgccattaacaccatgagcaccaccatcagccacggtaaacgcggtgttgtcgcatccattgccggcttgcagcttggcctggcgctgcatatcgttttggtcggcattggtctgggcgctctcatttcccaatccctgctggctttcgaaatactgaaatggctgggagcggcctatctgatttggctgggtattgtacagtggcgagcggctggcgctgtggatcttcatgcgcttgccactagtctgcctcggagaaaactgttcaaaagagcgattttcgtcaatctgaccaacccgaagagcattgtttttctggccgcgctgtttccacagtttgtattgcctcatcagccgcaggcggcacaatatctgattctgggcgcgactacgttgatagtggatatcatcgtgatgattggctacgccgcgctggctacgcgaattgctggttggattaaggccccgcaccagatgaagttgcttaaccgtattttcggcggtttatttatgctgataggcgcattgttggcgacagccaaaaaagtgtagccgagaagtgaatatctggccggaatactagtgatccggccagtaagggttatttcgaaaatatcagatgcaatccgaaaccaacaaataatacgcccgccaaaccatcaatccatttcgacaaacgctggtaaccgcggcgcatcaccggcagggcaaatacacaggcaacaacgctgaaccagataaaggtttctgcaacgatcaggataaacaatccccaacgtgcgccagcgctgacgtcatctccgacaaacagcgagaatacgctgccaaaatagatcaccgctttcgggttagataagttggtcagaaagccgcgcaggaaagtacggccgcggactggcagcgtcatttctacctcgccttcccccagctcgcctttggccctggctgatttcagcaattgccagcccatccagcacagataaagcccaccgccgaccataataacctgatgcagccacgccattttttgcagaattaaatgcagccccatcaaggccacgcctgcccaaaccacaattcccagagatattcctaccacgcccatcattgcttcgcgacgggaacggctggcggcagtttgagaaacgaaaaagaagtcagggccggggctcatcaaggcaataaggtgaaccaacgccacggtaagaaaaagcatcaacatgaagataatccgacaggaaatgagagaagaaaaaccactgtatcacgaggacggcagcccaaccagactgccgtttatgctttatattcaacgctggcaggcgctattcatcgttatccacatgatcgcgaatcatcgccataaatggcgcgccgaaacgttccagtttacgctgccctacgccgttgacgctgagcaattcgctggccttaatcggcatctgctccgccatttccagcagcgtcgcatcgttaaagacgacataaggcggaatgttttcttcgtcagcaatggacttacgcagtttgcgcaatttggcaaacagtttgcgatcgtaattgccgccgtaggacttctgattagcgctgctgcgcggtttcaggctttgaatgcgcggcaccgccagttgcagcggaatttcggcacgcaaaataggtctggcggcctcggttaattgcagggcggaaaactgcgcgatattctggctgagtaagcctaaatggattaactggcgcagaacgctcacccaatgctcatgggtttgatcccggccaatgccgtacaccgaaagtttatcgtgccccatttcgcgaatacgctgattattcgctccacgcagcacttccacgatatagcccaaaccaaagcgttgcccaacgcgatacacgcaggataaggctttttgagcgtcacccagcgcgtcataacgtttcggcgggtcaaggcagatatcacagttgccgcaggcctgttgtttcccttcgccaaaataatttagcaataccaaacggcggcaggtttgcgcttcggcaaaagcccccatggcattcagtttatgacgttcgacgtcctgctgagcaccggcaggcttttcttccagacagcggcgcaaccacgccatatccgccggatcataaagtaaaatcgcttccgcaggcaggccatcacgcccggcgcgccccgtttcctgataataagattcgatagtccgcggaatatcaaaatgcaccacaaaacggacgtttggcttgttgatacccatcccaaaagccacggtggcaaccaccacctgtaaatcatcgcgctgaaacgcttcctgaacctgggcccgtcgttcgttatccagaccggcgtgatacgcggccacgctcaggccgcggctttgtagacgcgcagtggtatcttcaactttagcccgactattgcagtaaataatgccgcttttaccacgttgatcctgcacaaagcgccagagctgatccagcggcttgaacttctcaaccaaggtatagcgaatattgggccgatcgaaactgctgacctgaatcagcggctgattaagatccagcaaccgaacaatatcgccgcgcgtggcttcatccgccgtggcggtgagagcaataactggcaacgcgggaaaacgacgtttgagctgacccagagcgcgatattccgggcggaaatcgtgtccccattgggaaatacagtgagcctcatcaaccgccagcagcgccggacgccaatgctcaagctgttcgaggaagttttccatcactaagcgctcgggagcgatatacagcagtttaatctgaccactgcggcaaccttccatcacggccagttgctgctcgcgagtttgtgatgaattgagacaacccgcggcgacgccgtaggcctgaagttggtcaacctgatctttcatcagtgaaatcagcggagaaaccaccagcgtcaagccatccatcaccagcgccgggatctgataacacaaggattttccgccgcccgtcggcatcaccaccagacagtcctgcccggcgagcgttgcattgatgatttcttgttgccctggtcggaattgttggtagccgaaagtctctcgcaagacctgcgctgccagctgttccttatttatcactgccgcggtagacactcgtttccccaactcttggatctgaacaggccggttaaccggcctgtatgtgattctgcactcacgccaaacggcgttacatgacgtcgttcaacatgatacccacaccgacacgggtttgcctaaagttatagtcaatcattgactcaccgtagccgctgaacacctgtgtgtagaagcgaacatgcttggtgatggggtaactccagcccatttcagccgcgccgtagccggaattccagttatagcgcccttccatgctaaatacactatcgccccaggcataaccgactttcaggcggtagtaacccaaatatttagtgatatctggattatcatcttttgcatcattttccgagaagcgataccaaggtttcagatctatctcccaatctccgcgctgcgccatcacgcgcgcataggcgcgatcccagctacgagaagttgggtctgctttaccgttagattggtggttcaaacccacttctatttcgcggaaagtccagcccgcaaagtcataatccgttgcccaggccaggaatacctgcggctcatagttagtttcgcggaatggcgaagattccccgctgttcgaagcctgccaccacgaacgctgagtgtaggatgcgcccaacagagagttttccccggcaatgccacgccagatagggaaccctaagctcagttggaatttaatctcatctttacgggcattttcggcccaatcataggaactaatggcttctttattgatattgctggagtaggtataaagcaggtaattggtttcgtacggatatagcaggaaaggattatcgtggtcttgcagcatggcggcaataatacttccacgaatcgcaggcgcatcatgaatcttttctaccttggcttcctcagcctgtgctaaaaccggcacaaataacaataccatcaatattcgccaaaagtgtcccatcattactctcatcgcctcatagattattcgtaattttaatgaaaagcagctcattctacacacaaatggcagtctggcttagcgttgtttatttttatgaatccgtcactagcgcgcaacaagttatgggcataaaataaacatttagttaacagccgccgtattattatcggctacgaaagtgagaatcaagccacatgtctggaaccatattaacccttgaagaagcgcgccgcttgattggcgaagtttttgtctaccacatgccgtttaatcgtgagctaggtctggaattacgccgctttgaacaagattatgcagagttagcctttagtcatcaggatagattagtcggaaatatcgctcagcgcatcctgcatggcggtgttattgcttccgtactggacgtcgccgccggtctggtctgcgttggtaacagcctgacacgttacgaacccttgattaaagagcagttacagcaacagctatctaaaatgggcaccatcgatttgcgcgtggattatttgcgccccggccgcggcgagcatttcaccgccagcagcagcattctgcgcagcggtaataaagtcgctgtcgctcgcgttgaattacataatcaggatgcggttcatatcgccagcgccactgcgacttatttagtcgggtaattgtcttttttcagtgagtaaacgccaatgatgcttagctacaacaagttaagtacactcaccgtatcccttttttgttcagagctattccatggataagcaacaaacgcgtcagggcattttctttgctctggcggcctattttatttggggtcttgccccggcctatttcaaattaatccagcaggttccggcagatgaaattctgacccataggattatctggtcattcttttttatgctgattctgctcacgctgagtcgcaattggccacaggtacgccaagcctgtcggaataaaaaacgcctgttattactggcggtcactgcactgctgattgccagcaactggctgctgtttatttgggcggtcaacaaccaccacatgctggaagccagcctgggctacttcattaaccccttggttaacgtattgttcggtatgctatttctaggcgagcgttttcgacggatgcaatgggtcgcggtcgcgctggcgtttggcggcgtgcttattcaactgtggcagtttggctcgttaccggtgattgggctggggctggcgataagcttcgcgctttacggcttattacgtaagaaaatgggcatagacgcgcagaccggcatgctggtagaaacgctgtggctgttacctattgccgcagtatatttattcttctttgccgatagcccaaccagtcatttgagcgctaacgcctggtcgctcaatctgctgctggccgctgccggtgtgattaccaccattccgttgctgctgtttaccgccgctgccggccggttgcgcctctctacgctgggctttttccaatacctcggcccaacgctgatgtttgtcctagccgtcactttctacggtgaaaccatcagtaacgacaagatggtgaccttcgggtttatctgggcggcgctgctaatattcacgctggatgcgctctatacccaacgtaagttacgcaaataggctgcgacgcccgatgtagcctcatcgggcgctcacacagtttgggccttacagccagtttttacgtttgaagtacagataaggggctaaaccggcgacgatcatcagaccaatagcccccggatagccgaatgaccaacgcagttccggcataaattcaaagttcataccgtagctcgaagccaccagcgtcggcggcaggaagaccacggagaccaccgagaagattttgataatccggttttgttcgatgttgataaagcccatcgccgcctgcatcaggaagttaaccttttggaacagggattcgttgtgcggcagcagggattcgatatctcgcagcacttcccgcgcctgctctagctgaccagtaggcaaacgcgctttacgcaccaggaaattcagggcgcgctgagtatccatcagacacaaacgcaccttccagccgatatcttcctgctccgccaacgtggacagcgcggcatcgtactcatctccctgatgcccttccataatcacgcggctaagcgcttccagatcgctgtaaatattctctatttcgtcagccaactgctcgattttggtttcaaacaagtccagcagcagctcataggcgttaccgtcgaccaacgtctggttgcgggcgcgcatccgatacaggcggaaagcgggtaactcgcgctcacgcagggtatacaggcggccatcccgaatggtaaatgcgacggtggagttaccagcgtgatcttcggcgtcttcaaaatagaagaatgagtgaatgtgcaaaccgtcttcgtcttcaaagaaacgagcggaagcctcgatatcatccagttctggccgggtcgccaaactctgccctaactcacattgaacacgctcacgctcaccttcttctggctccaccagatccacccacagcgaggtagtcagatcttcggattcatccagctccagacgggataagcgattgttctctaatttaaatgcgctcagcatgtgccataactcccttggggaatggatagagattacgcattgaagcacagaaacaaggggatgtcgttacatcagcaagtttcagaccataaggagatctgactcacagcgacggtcaaacgaggtcgctgacaaccacgaaggctatcagcaaaagaggatagccttagaagttgcaccatatgaacaggttattgagccagcatctactgggtgtgtccaaggcgaatgtcctcattaagaatagtgcgcgcatgttacgctgagaagaaaaaggctgtcaaccgctacgccgcagttagtcgcagcctgagattcatcctatttcctggcaaatattgttgtcagcgtaaacagatgataaacggcagacttaggctaatcactctggcttatatctgccttccgcttcggctacattgggcgctacgcctcaactggaataacggtaaatgaaacaaatcactcgacctatgctggcacaaatgagcgaacaggctagacaactcagccgtttgcgcactcatcataattttcacccggaactgagcgattccgtccagcgtctggcaatagccatggagccactaacctacgtgcgcccacatcgtcatccacatacctgggaagtactaactgccctttccggacattttgtggtgctgttattcaacgataatggcgaagtgacagagcgggtagtactgggaaaagaagcgaccattctggagattcctgccaatacttggcacgcggtgctgtcgatggaagaaaatgcagtgatttttgaggtgaaactcggcccctatcagccagtcaacgcggaagatttcgcgccttggtcaccggcagagagtgaaccagaagtcgccaatatgctggcatggtatcaaacgactacggtcggcgagcgttattccgcttaactatttgatttaaaaatgatgaaaaaaaccggagttatcattagctccggtttttttatgctgcaacggcgaatgatggcttataccgcttccagtctcgcataggctgcaaccagccatttaatcccttcgcctggaaaagcaatttgcaggcggctgtgctcgccgctgccttccagattcaccaccgtaccttcaccgaatttaggatgacgaactcgctgacccagagtgaaaccgctgtcgttttcattcattggcgtccccatacggcgatgatttaccggacgagaaacgctggcgcgtagtctgacttcttcgatacactcctgcggcagctcaccgataaagcgggatgggcgatgattgacttctttaccgtacagtctgcggctttccgcatagcataaggtcagtttttgcatcgcacgggttaagcctacgtaggccagccgccgctcttcttctaagcgtccaccttcatccagcgacatttggctcgggaacatgccctcttccatacctactatgaatacctgcgggaattccaaccctttagctgaatgtagcgtcattaactgtaccgcatcctgataggcgtccgcctgcccttccccagcttccagcgcggcgtgggacaagaacgcctgcaacggcatcagatcttcatcctcgtcctgataactgtactgacgcgtggcgttgaccagttcctcaaggttttcgatacgagcctgacctttttcgcctttttcctgctcatacagggtccacaggccggaatcgcgaatcacgcggtcggtttgcacgtgcagcggcatatctgctgtttcgtgagccagtgaatccaccagttccacaaaacgctgtaaagcagaggcagcgcgccccgccagcactttttcctgcaataacgctcgagtagattgccacagcgtaagctggcgatcccgcgcagtctggcgcactacatctagagtacgatcgccgataccacgggttggcgtattgaccactcgctcaaaggccgcgtcatcgttacgattggaaattaagcgcagataagccaatgagtctttgatttcctgacgttcgaagaagcgctgaccaccataaatgcggtacggcatcgccgtttgcagtaaagcctcttccaatacgcgagattgggcgttgctacggtacaaaatagcgcagtcgtttaacgcaccgccgttgtcttgccaggctttaatccggttcaccacaaagcgcgcttcgtctaattcgttgaaagcgcaatagatcgaaatcggatcgccttccacgccgtcggtccacaggtttttccccattcggccatcattgttggcaatcagggtattcgccgctttcagaatattactggtagaacggtaattctgctccagacggatggtttccgcgccggggaaatccttcaggaagcgttgaatattctcaacctgcgcaccacgccagccgtaaatcgattgatcgtcatcgccgacgatcattacgttggaacgatcgcccgccagcaggcgaatccatgcatattggatgctgttggtgtcctgaaactcatccaccagaatattggtaaaacgttcacgataatgattcagaatatgcggtttattcagccacagttcatgagcacgcagtaataactcggcaaaatcgaccagaccggcgcgatcacaggcttcctgataggcctgataaatacgcagccaggtggcttctaccggattaccgtagctttctacgtgctgcggccgtaaaccttcgtctttcttaccgttgatgtaccacattgcctgacgcggcggccactgtttttcgtctaaattcaatgccttaacgatgcgtttcagtagccgatgctgatcgtcgctgtcgaggatctgaaagtcctgcggcagattggcgtccaaatggtgtgcccgcaataaacggtgcgccaacccgtggaaagtcccaatccacataccgccctggctggtaccaatcaaatgttcgatacggtgacgcatctccgccgccgctttattggtaaaggtcacggcaataatggaatagggtgaagcattctcaacggagagcagccaggcaattcgatgcaccagcacccgggttttaccactgcccgcaccggccagtaccaacaggttgcagcgcggcgcggccacggcttcacgttgtttttcattcaggctgtcgagcagatcagaaacgtccataggcaccgtttatcgggtaagggaaaaccgcgctgtcgcccggtttgaccggacgaccatcagcattccactgggaatttatacagagtaattgataggattataacaatgctgtgagagatgccaactgcgaaatctcaatatgtggcagtaaacgggcatcattgaccgccatgatatttttctgccgatcgttaatccagcaggcctgcatgccgcaacgcagggaaccagcgacgtcggtggtgagatcgtcacccacgtgcaaaatgctttccagcggcaaatccagcttattggccgccttttggtacatatcacgataaggtttggcacggccattggggccagagcgcagcacaaactggaaatagcggcttaaaccgcaggcggcaggatcggcgttaccgtttgtgatagccaccagcgggaagcgttctgacaaggtctccagcgtatcgtgagtcgccgcaggcacatgaatacggctacgccacagggcgaaattctccatcgccgcgtcagcacctttacgggcttcatctttggtcaggccgtggcgaataagacctaactccaacgcctgccaacgccactgggtaacatcgtgataaatatccggatcgctggccagcagttcaatgcgaaaacgatgaaaatccgccacctcaagctggcgtaaattcggatgatactgttgcagaaacgccaccgattcctgttcggtacgggaaatcaccgggcggttgtcgtacagagtatcgtccaaatcgaaggttatagccgcaatcggctgtaatggtcggtaaaaatgcatcaggatttgcctcgtttggctcgcggatgggcggcatcatacaccgttgccaaatgttgaaagtcgagatgggtataaatttgtgtggtcgttagattggcgtggccgagtaattcctgcaccgcacgcagatcgccgctggattccagcatatgagtggcgaaagagtggcgcagtttatggggatgaatatggctgctaacgccttgttttataccccattcggcaaagcgtttttgcacattgcgcgcagaaatacgcttaccggtattggcgaggaaaatggcgtcatcggcgggttcaaacaactcccgtagcgctagccaatgctgtaaccaagtcaccgccgtagcgcccatcggtactttacgttctttgctgcccttgcccatcacccagatttcgccactggccaaatccacatgtttgcaatccattcccaccagttcggctaaacgtaaacccgcgccgtacatgacttccagcatcgcccgatcccgcaccgccaaaggatcgttaagatcgatgtccaacagtcgactgacttcatccacatcaatattttttggcagatggcgccccgtcctcggcgtactgacgcctttggccggattggcgtgtaacacgccctggctgaccaaccaatcgagaaaactgcgtaatgccgacaggcgcagcgccaggctagaagactgtaatccagcacgcttgctgcgggaaaccagcgaacgtacctgcgccgcatccaaactctcccactggctcagccccatttgacccgccagttccatcaccgcctgtagctgtcgagaataactggttatggttaagggactcagttgccgttcaaccttcagataacgcaaaaaggcttcaacggacggagagagcgtagcggggatttcactcatactcgttcgatccagcgctccaacaaggtaggcaacatcagcgctaactgatgcagcatcaccgtacccataccctgctgataatgttgtgtatcacggctactaaagataaccacgcccaaatcgccattcgcgcccatcagggacatcgcaaccgagccgacctgtttagcctgaggcaacagcaacaaaagctctggcccatttaggctgccgaggtaatgacgctcatcccccaaacgctgaatgcgcatcggttcaaaagcgtggcgtgctaaacccagatgagtgaaatcggaaggcgcgccaatatgccagcggtcgttaaacaggcgcacattggctcctgccaatccaaaatcccgcgcccagcgctgtaggcgattcagcatatcttgcaggctttcggcggaggtcagattagtttgtaactgtaacagacggttaaacagcagctcattcagaccggcctgctccatcaacagggtaatttcttcttccagttgatgaatctgattacgttgacgagccagttgccactcgaccagagacacgctgcctctgaccggatggggaatttgcatctgttcaaccaaacgggcattacggataaagaagtcgggattttgcaataaatactgcatgacagcgtcgtcgtctaactcaatgccagccagcgcctgttcctcataattcttcattcttcaacacccatcataaatgaataaaaccgtcgtagacgtgggtcgcaggcccggtcatatacaacgggtgacccggtcctttccagctgatatccaggctgccacccggtagctcgacgtgaacctcttcactcagcaatgcctgctgaataccgactgccacagccgcacaggctccgctgccgcaggcttgtgtttctcctgcgccgcgttcgtagacccgtaaacgaatgtgttcccgactgacaacctgcataaagccaatgttggcgcgctcaggaaaacgctcatgattttccaatactggacccagcaactcaacgttggcaaccgaaacatcgtccacttgcagtacacaatggggatttcccatcgaaaccaccccgcacagcaccgtgtgctctgccgcgcgcaaaatgtaggttttttcagcttttatcgctttaaacggaatcgcctgcggctcaaaattaggttcacccatattgacgcacaccagctcatcctccgtcacgctaagcaccatacgcccagtttgcgtactgacacgaatatcacgcttgttggtcagccccttaatccgcacgaaacgagcgaaacagcgggcaccgttaccacattgagagacttcgctgccatccgcattaaaaatgcgatagtggaaatccagctcaggatcgtaaggcggttcaaccaccagcatctgatcaaagcccacgccagtgtgccggtcagccagtcgtcggataagctccggcgaaaaataaacattctgtgtgacggcatcgacaaccataaagtcgttgccaagaccgtgcattttggagaactgcatatcatgctccactgactactggctaaatccggacgcgataaagcgatttatcgcagtaagcatctggcctccaacagcaggaggccaacgtcaaactgcggggagaatctgggttactgtaagccgccgatagactgagtctgctgcgagccaacattatcttcttggtttttctgcactttgcctgaatctggcggtacagtttctgtctttgaattttccgcaggagggaaataaagtggcccttttaagccacatccggatagccccaccaacatcatggcgaccagcggccagcgtagttctcttttcattgcattaatgcctgtaattcatgcgtccaaggtctctataatcgcaggtggatcatgaaaagcaataggaattgaatatgaacgacagcgagttccaccagttagccgatcaattgatgtcaaacattgaaaatgcagtggataattttgatggcgacagcgatatagactgtgaaactaacgggggcgttttgaccctgactttcgagaacggcagcaaaattgtgattaaccgccaggaaccctttcatcaggtttggctggcaaccaaaaccggtggttaccattttaactatcgggaaaatgaatggcactgcgaccgcagcgggaaaactttctatacgctgctttctgaagccgccacggctcaagccggtgaagaggttagcttcgactaacctttattccagcgccggccagtaagaatcggtaaaaggacacaaaacagcgtgtcctgatttccggtttaccaatgacgtttaacgataactagtgcagctgaaactgttgcggcggcgtggaagactctttttccgtcgcgttatgacacagatgagaaagcgtagtgctgcggaacggaatcacctgagtgcgcccgtctaactgcacaatctgatagaactgcggcaggttaaagttaataaagctggagccataggtgaaacgatcgtgagacgatgagtagaagcggctgacatcgcgcaccaactcttctttactgccttcgcaatgatggtaaacctcaactctattgctctcgtcgagaatgtagatattgaagcctttcccatcgctagtgccttcaaagaagaactgaataattccttcactagcgaatccgtcgacaaccggcggtaaatgaatctgatcggtttctacctgaatcgacaggccatgcagcttgttattggaaatggcaccgtagaattccaccgcattttccagtttctgcaccgatacactaagacgctcgaagaacagcccccaggtctgcccggcgactcgaaccgctttaaagcgacccggttcttgacgagtgctggaaaggcgcagctcgatgcattcggataccaattgttgaatgcgggtgcgaatcagcccgcgtaaatgctggctgtagcagaatacatcaacggattccggcggcgcggcgtcctgatgcattttgcctaaaatggttttcaatgcctccaataccgcctgttcgccgctgaaatgcagggttcgcacttcgttccacgagttgcgatacagtaaatcgatactgcccaccagacactgctgttgctcaccgaaactgaatacgtccagttttcggaaatcaaaatgcacaatctggttgcggaaagcggccgtcggatcgttttccagattgacgatgatcgccagatggcggatttcgcacgggctgtacagcgctttcggcgtcggcgcaggcaaacgcaatgggaaatggtgagaaacatccgtcaccagttcttgcaattttaccgtatcgcacaaattggcgcttttaatatgtaaatgcgtttttgacgtcagtaagccgttgaaataagcccaagccaccagtttgttcagatagcggttatattccagcggctgatggctcactatggcatccatagacggagcctgattatacaaataccaaccgggccggttagcgcgtcctgccggtacgtgaataaaggtcaaatgttcttcggacagatccggcgagatttgtgggttaactaaagtaactttacccggtagcgcctcaaaggccgcatagagtttacgggtcaataccccgatatcctgcggactggcactaacgctcagattattacgacgcgcgaaacggatcagattgcgataactctgcatcatcgcatccaacagctcgttatgcgcttcacgcacccgctcaattttccagttggcgcgattgtccagcatttccagacgctcttcgctccagccccactcactaaccagttggctcagtatctcccgacgccaaccgctgctggccggcgttttagacagtttttcgcaaactttcagatagaaacagcggcggactaaatccagacgagtagtatcttcgatttgcgtcagataacgcgtgacgcgatccagcatcatgcagtagccatccagaccgaatgacacaatctcgcctttatgcagacgctgcttgatttccatcgccagcagctgagaattcgggtattcccacgaatacgcttccaacagcagcgttttcaagacggctttgtagggtgaatcaatactcttatagagctgccacaggctggctccgaaatactcttcagccgatagggtactcaagccaccgagatccagccattcatttggcgtcagcgcaccttgggcatataaagaaagcacgtaatcgtcgtaatggccttcttcttctatcggcaccatattccacagaatacgtttccccgccaggcgcactgcgctgcggtagaactcgtctaataacagaatatgttgcgtagaaccgcagtcttcaccgcccaaactgccgctggcattgtggcggaaacggttttcgtcgatcaggaaaaagctgacttcgacgcccatagaggccgcccatttctccaattggctgcatttttgttgtagctgattgcgttcttcgttatccagccaggcttggtggcacacccaaatgtccagatccgaagtgctgctttgcccaatagaagaggtactgcccatggtgtaaacgccggtgatcggcagttcgccttcccgcgctaattgcagcggttcaccccatttgctttcaacttcagtaatatactgttgttgggtttccgtaggcgtgaagaaacagacgccgtggggaacgttaccatcaaggtaacctggcatcagtgggtgatgataatgtaataaggttggcagcagactgtagaccttttggaaggctggccccatggccgccaaggcgcgatcgactcgtaattggttgatcgcatccagtcgctgtttcagtgtctcgatgtagaggtacaagacgtctcgcctgattgttccagtgcctagaaaaaaacccgtgttcccgattcgcctttagtttagaagaatatttaacgaattattgctggaaacgtgatcaatctaacaccttgccgattgaccgtaaagaaagtaaagctatatgcgccattctaatacttacccagccaccctatccagccgtccatttgttaccatagcgtctttcttgcacggttatccgcctgaatcctgtggcttctacactgacagttttcccttctcggtgttaggatggttagctaaatataaaaacggtaatgagcatgttagacaaaattattcgaattgccacgcgacaaagcccattggcattgtggcaagcacattatgtacagcagctgctgcaagcctgtcatccggggctacaggtggagctggttccgatggtgacccgcggagacattatccttgatacgcctttggccaaagtgggtggcaaaggcctgtttgtaaaagagctggagctggcgttgctggaaggccgagccgatgtcgccgtgcattctatgaaagacgtgccgatcgccttccccgaaggattggggctggtcactatttgtgaacgtgacgatccgcgagatgcttttgtttcgaataattaccagcatatggatgaattaccggcgggcagcgtggtgggtacttctagcctgcgccgtcagtgtcagctacgccaacgccgcccggatctgatcgtcaaagatttgcgcggcaacgtaggcactcgtttgtcgaaactggatcagggcgactacgatgccattattctggccgtcgccggtttaaaccgccttggtttgaaagaacgtatccgctacgccatgagtccggaagaatccttgccagcagtcggccagggcgctgtcggtatcgaatgccgtctggatgatactctcacccgcgaactgcttgcgccactcaatcaccgccagactgagctgcgcgtgtgcgccgaacgcgccatgaatacccgccttgaaggcggctgtcaggtgccaattggtagctacgcggtgctagaagatgacactctgtggctgcgcgcgttggtcggcgcgccggacggtagccaaatgatctgcggtgaacgccgcggcccatctgccaatgcagaacaaatgggcatcgagctggccgatgagctgctctctcgcggtgccaaagaaattctggcgctggtttatcaggataatccgccactatgactattctggtcactcgcccttctcctgccggtgaacagttagtcagccgcctacgagcactaggtcgggttgcctatcatgcgcctttaatcgatttctctccgggccgagatttacctcgtctaccggaaatgttggcagaaatgcaggcaggcgatctggtttttgcgctgtcgcagaacgccattcgctatgccaacccgctgttaaacagaaataaactgttctggcctgccgagctatcttattatgctataggtcgctcgacggcattggcgctgcacacggtgagtcgcctaccggtcacttttccgccgatgggtgaaaccagcgaaatgctgctcttactgcctgacttgcaggaattacagggtaaaaaagccctgttgctgcgtggtaacggtggtcgggagctattaggtgaaagcctcgcagcacgcggcgccgaggtcacattttgcgaatgttatcaacgtagcccgatctattacgatggcagtgagcaaagcgcccactggcagcgagccggcgttgatatcctggtggtaaccagcggcgaaatgttacagcagatctatactttaattcctgattactatcgttcttcctggctgctgcgctgccgcctgatagtggtgagcgatcgtttggccgcccttgccagtcaactaggctggaatgacattcgagtggctgagaatgccgataatgacgcgctgatccgcgcgctacaataaacctgactatgggatgcccaatatgacggaacacactaccccatccgccccagtggaagagacaaccacagcggttgagcggccccaacagccagaggctgaaacaccaaaagacaagcgtagcgggcccattctcggcgctgttgctatcgccattgcaattattctgagtgccggcctttattatcagggccatcaacagaaacaacagttggtcgccgccaatcaagcgttacaagaccaactggctgcgttaaaaaccagccaaacgcaggaaaaacagcggcttgaagctttgttacagcaacaaggtaaagcgctagacaccgctgaccgccagcaagcgtctttggctcgccaactcaatgaactgcaagggaaagtcgccaccatttccggcagtgatgctaaagcctggctgctggctcaggctgattttctggtgaaaatggcaggacgtaaactgtggagcgatcaggatgtcctcagcgccgcaaccttattaaaaagcgccgatgcgagtctggcggatatgaatgatccgagcctgattgaggtacgccgcgccattaccgaagatatcagcgcactgtctgccctaagccaaatcgattttgacgggatcattctcaagctaaatcagctttctaatcaggtcgataatctgcgcatggcggataacgtgactgatgatgcgccgatggatgaagacagcaccgaactgtccagctccctttccgattggaaacagaatttatccaaaagctggcacagtttcctctccgatttcgtgactattcgccgccgcgatagcagcgccgagccgctgttagcaccgaatcaggatatttatctacgggaaaatattcgttctcgcctgttggtagccgctcaggcggttccgcgccatcaggacgaagtgtacaaacagtcgctggaaaccatttcaacatgggttcgggcttatttcgacgttaacgacccgagcaccaaggctttcctcgatgaactggaaagcctgagccaacaatcgatctcaatggacgtgccggatcagctaaaaagccagccgctactggaaaagttgatgcaaactcgtgtccgtaacctgctggcgcaaacgcctgtggtcaatcaggagggataagtatgattcgagtcttactgctatttctgctgctgatcgccgggatcattcttggcccgatgctcgccggtcatcaaggctatgtattgattcaaactgatgattacaatattgaaaccagcatcactaaattgaccattatgctggttggattgattttcgtgctgtatctcatcgaatctgtattacgtcgaatgttccgcaccggggctcgcaccagaggctggtttatcggtcgcaaacgcagccgcgctcgcaagcaaaccaaagccgcgctgatcaaactggccgaaggcgattttaagcaggttgaacatttgcttacccgcaacgccgagcacgccgaacagccaatggttaactatttgctggcagccgaggcggctcagcaatgcggcgacgagttccgaaccaatcaatatctggagcgagctgccgaagtggcagataccgaccaattaccggtagatatcactcgggtacgtattcaactggctcaggggcagatccacgccgctcgccacggggttgatcgcctgctggaactggcgccgcgtcacccggaagtattaaggctggcggagcaggcttatctacgcaccggggctttcagctcattgctggaaattttaccggcgatgcagaaaatacagttgcataccgcggctgaaatcagcgcgctggaacagcaagcttatattggcatcatgaatcagtgcatggccgaagaaggcagcgatggattgaagcgctggtggcacgatcaaaaccgcaaaatccgccataatgtggcgctgcaggtagctctagctgaacacctgattgagtgtaacgatcacgaagtggcgcaacaggtgattctagatgggctaaaacgtcaatatgacgaaagactgatcttactgatcccgcgccttaaatcaggtaatcccgatcctttggaaaaagcattacgtcagcaaatcaagcagcacggcgcgacgccattgctaaatagtacgctggggcaattgatgctgaagcacggcgagtgggaacaggctagcgaagccttccgcgctgcgctgcaacagcgtcccgacggctacgattacgcctggctggccgatgcttatgacaaactgcaccgtccagaagatgcggctcaggtacgtcgtgaagggttaatgctaacgctgaaacaaaacggcgagtaaaatcttttactgtgattgagacaggctcctgcgggagcctttcttttatctgccgaaccgcaaactttcctaccggcaaaaaaaaacacttgccgattaagcaagtgtcataaaatatcaggtctacagtcaacagattggtgcctcactcaacgttacgcccggtatgtgatgaaggaggggattggttaccgctcaacatcgtttacgtggacaataggcaccctaaaattggctctgcatcatccctgggtttatgaagactaagctgtcataagaagtgggatgagcatctacaagatagatattgcacttcccgtgccaacttatttaatctcttgaacgttactgtaaataaagccaaaaaagtgacttaacattatgaaataaatcaatttttaatatttttagaccaagaccgatttattcctcttcaggctctgagtttcatcacgtttggatttgatctgtcgctacaaaacgacgtaaaaaccgattcctatttttattcatatttatcattatgttatatgtctccattgagagacattaccgatatctagtgtcgcaaaaacccaacaccgataaatcgcaatagctttggctttggctttggctttggctttggctttggctttggctttggctttggctttggctttggctttggctttggctttggctttggctttggctttggctttggctttggctttggcaggggaactgaatccatttagctgagaaaacgctacctgatgaatcctttaattgaagtattgctctttgaatgatgcacaagagaattaaagcagcggaatattgataaagcagaatgccagcggcatcctcttctcagcgataagcagaaagggttaacgctgagagacaaattcaagacgaaaaaaaaccccgcattgcggggttttcttcggaatgtggtcggcgagagaggattcgaacctccgacccactggtcccaaaccagttgcgctaccaagctgcgctactcgccgatttcttactgcctactctacatagtctttcgacttatgtctatgtaaatattaataaaatctacatagtttgtgtggtgcgaagggagggacttgaaccctcacgtccgtaaggacactaacacctgaagctagcgcgtctaccaattccgccaccatcgcatgttccacaaaaatttggggtggctaatgggactcgaacccacgacaactggaatcacaatccagggctctaccaactgagctatagccaccataacttctttactgctcacaaccgtcgtacgcggcaatattaccaccgcagctcttgcacacaaaattaatggtgcgcccgacaggattcgaacctgagacctctgcctccggagggcagcgctctatccagctgagctacgggcgcttagcgccgttgcgggtgaggatactacggttttaatgcctaactgtctagtgcttttttagaagaaatagtgcgtttgattacgctttgctctctctgccgcaaaagacagctatttagtcccctcaccctacctttatcgctggttttatagacgtttcgtcatcacacgcgtttcttatgcatccctaaggcgaaatagcacagtgacactaacgccaggaaaatcgctcccactaataaagataagcgcgtatccggattaatccccataccaaccagcacacaaatcaggaaggcgatggtcagatagttcacataggggaacataatggatttaaacggatgttgcttaatcgcttctttatgtacctgacggaaacgcagctggctaatcagcaccacaaaccacggtaccatacctggcaacacgctggcgctgtagacatacacaaacacctgctgaggattaggaatgatgtagttgaggctggaaccgatcagcaaacacagaatagtgactgcgatacagtaaaccggcacgccgctggcagagactttcgtcaaaatagcgggcaactggcgattcatcgccaaggcatacaacatacgcccgccgctgtacataccgctgttacagccggacagcgcagcggtcagcaccacaaagttgataatcccagccgctgcggtaataccaatcttggcaaatgtcagtacgaacgggctaccggtagaaccaatttcattccacgggaagatagtgacgatcacgaaaatcgcaccgacgtagaaaatcagaatccgccacagaatattgttaatcgcgcgttttaaggtgacttgggggtttttcgcttcaccggcggtgataccaaccagttccacaccctgataggacgctacgacaatacacagtgcaaacaggaaacctttccaaccaccagcaaagaagccaccgtgctgcgtcaggttatcgaaaccaatcgcctggccctgattgccgaaaccaaagaagatcacgccgataccaaccactatcatcacaataatagtggtgactttgatcatcgcgaaccaaaattccatttcaccgtacagccgcaccgctgcgagattcgccaacgcgacaatgactacgccggcgatcgccggtatccactgtggcaattcggggaaccagaagctgacgtataggccaatggcggttatctccgatatacccacggctatccacataaaccaatagccccaggccgtcagatagccaaaatacgggctgagatacttatgggcgtaaaccgcaaaagaaccggccaccggctccagatagagcatttcgcccatggcacgcataatgaaaaatacgaacaacccggcaatgatgtatgccagtaacactgatggccctgcccatttcagcgtactggctgcgcccataaataacccgacgccaatggtgccacctagcgctatcagttcgatatgccgggcttccagcccacggtgtaatccttttttatcttcgttgtctgccataaatcctctgtagacttaattttgttgtgttcaatcccccggataaccccggttgttataattatcaggaaaagagaaaagcgactgagttcacgccgaacacctgcgaaaggaagcgctaaaactgctggtctgctgcaatcaggttagaaaaatgcatgccgagctaacttaaaaaaactgtcgtactcgtcacggaaattaaccggccaatatcgttccgtatctgaatcatataagcaaacaacaaattaaaaccttatggaatataaaaatgaatttttattccttaaagggatattgctgggatgtatttttgcgaggaatagctcaggaggaaatactggcagggctggattcaccaaccctgcgacagacgcagttaaagacgtccggtatagtaataacctacaaatttaagcaatttaagctgacgacgaatacggctcggctgcgacagcaggcgatacagccattctaaccctagattctgccaaaccttaggcgctcgctttacatggccagtaaacacgtcataagtaccacctacgcccatatacagcgcattagggtgaacctgacggcaatcgcgcataaagatttcctgctttggcgaacccatagccaccgtcacaatcgctgcgccgctggcagcaatgcgggtgaacaaggcgtcccgctgttctggagtaaagtagccgtcctgtgagccgacgatattcacattccactgcgcccgcagtttttcttctgtttctgccaggatttccggcttaccaccgaccagaaacaccggtgtcccctgctgaccagcacgctgcatcaaggcttcccacaggtctgcccctgcaacgcgcgacacttcagcaccggcatacttacggcgaatcgcacgtaccatgctgatgccgtcggcgtagagatactccgcatcgttcaactgggttcgcaatgcggcgtcatcttccgccttcagcagcttttccgcgttcatcgccaccaaagtaccggtttttacttgttcatttcccagcagataatccagcacctgggccatatcgcggaacccccagatattgaagccacgcaggttgtacttaggaattgctgttttttgttccatttctacacttaaaccttacagttgactcgtcgtgtcggcagaagaagcattgttcgccccagtatagctgcgacgaatacgttgcgttattagtccgctgacgtcgaataaccaatacagcagtttcgctaccaccagacaggcgccgaaaataatgcaaaagaagaccactcgagaaacaaacgaatccagcccttcacgcgccaatacgatcatattaaatacggctccgaagcagaagctttgcagaatcgccgccttgtagcggttagtttccgctttaccttgctcgtatagccagtcaaaccacttaataatcagcccgacaataatcgcaccgatagggataaacagcgcgccgcccataaccaccagagaaccaatcagcgtaggggaaatcgccagcccggaatggttatccaatacgtcccaggtgaagtagttcgcggtattcagcaccaaatcaggacgccccggccagagccagcttgggataaacacgtagaaatctcgaactattggtgccagtccctggaaatctatcttgtcgtaattttgcagcaacagccccagattttcccacggcgagaaggtgtctcgcgttaggtacaggaaggtatagaacgcctccgcgccgctgacatccaggctatagcgtttcagcgccagccagaacataccgacaataccgaatacgccagctgccaccagcatccacagcgtaatccaaccgcgcacaatgccgataaacaggaacaatgcaaaagcgataatgatattggcgcgggttccccccacgataacataggtcagaatgccgaaggctacggtgctggcgaggaaaaagaaccatgcccgcatatcctgtttaaggaaatacaccaccaacatcgccggaatgaagaagtagaagaaacgcttcagagccacgccggaaacatcactggagaatatctggctataagaattcagcttaaataacaggaagccgttctgtaggaagaaaatacctacggtgccaatcgccaccagcgccaataagatccaggtcaggttggtttcaacccgattcatcgtaaatatcggccgccgtggctgagttcgtggcttccgcagacgcgttttataggtgacatagtaaatggcgtaaaacgccgtggcggacagtatggcgtacagcaaatagtccgccggaactactgcgacatcaaactgaaataccaacatgcaggtcagcggaaaaccgaagtaaaacgtcagtaaatacagcatggaaaagaagacgttaaagttgaagcgaacccgcctgaactcctgataggtcaacgtgaggataaaaatcactgcgatcaaatagacgctcagcaagccgccaaattgccccaacgtcatgggttttctcccgccgccagcgctaatgcctgctgccaaccatcgatataattagggttaaagaaagcgatggattgcttatccagaccggccaattgccgttgtgcttcacgtatcaaagcttcatccagcgtatcaccgtagaacaacactggaatatgttgctcagccaaatcctgccagaacggattcagacggctaaggacaaaaggcacgccaaattgggttaacagacacaaagtgccgattccctgctgacgattaaaaataaaatagcctaaatcgcattcgcgcagaatattcagatagtcatcgaaggcaatttgttcggtcagaatacgtagattttctgccggaaataacttcagcccagcggttcgcacctgatcgatataagcatcattgttcgcgggatagcccatcggcaaaatcacccgaacatcggcgccaaactgctgacgaatggatttcagcgcttcaatatgtcggttagtggtatcaccggaattaccgaccaaaatcgtcattggcccgactaaaggcttctcagcctgaacgccggtcagcgtcgggtccatacgcgttgggaaataaagcaaagacgctggcactcgcggatgacgctgctgatagtgaatcaaatccccgcgagtagcaaaaacgtgcccgacacgcccttgagccaagcggcgcagcaggtaaaacaggcggaatttccagctttttgcatcttcatacagatcggcaccccaaacgtgccagaaaacctgatatggcttaattttgccgcttaataaagccaaccacagcgtggcattaaactgtccatgccaaaagaaacgggtattacgatcggcctgcgcgcgcccaataaccgcctcagccaacgctttcttattgggcagagtttcaatctctaaagcatcaaaaacagcaaaggaggcactgtctttcgccgcgaccataaaatgccgcacctgttcggcgggcaggcgcgcggccagcacatcgttaaagaagcgcagcaccgtctggttatgatgcgggatgtcagatcccaatacgtgaatcagggttttcatgtttttctaggtaacgaagatctacggtaaatgacgaatacgcagctacacagggcaaaataaacgatataagttgccatataagcctgggctgcgccaagagaaccatgtaacggaatcagccaatgggcaaaaccggtcaacaacaggaactggctaacttccgctagaatataaaatcgcagggaggcttttgcgataaccaaatagccgaagacataagaccctacttttagcacgtcacccaccaactgccaggcaaataaatcgcgcatcgcggtaaactgcttagagaataacagccaaatcgcaaaatcacgcagtaaccacaccatcatgctggctgcggcaaccaccggcagtacaaacttcagcgagcgtaaaatctcgcgggaaatatccgctttatcctttaaacgcgacagcgtcggcaacaaataaacggtaaaagaggcggtaataaactgcaggtaggcatctgaaatactgcttaccccttgccaaataccaacttcatcccagccatactgttttgccagaagattacgcatcatcacgtaagcgacaggaagcgttactgaggtaatcagcgccattatggtgaacttacccaaatggctggccagcgccttatcccaacttagtttaaggtagctgaagggaatagtcttgcgacgcaccagaataaaagtcgctggcacgacgaccaacgcaggaaccaatgctaaacccactaacgcgccaaaatagccgcctaatcggaagcaaagataataagccactacgccaatcagactaccgccgataatcgccagcgcgttgcccatcgcatcgcgataacctttaagaatagccagaaacaggttcgcgtaggcgatacccatttgaataaaggcgacggcacgcaccacgttctcataatcagcacggccaaatagcgccacgctcaccggttttgccgcaaataaaaacagcaaagccaataaggtagagaaacccaacactatcgccgacgaggtgcctaataccgcacgtagccgctccggttgctgatgatattctgcgacatatttggtaacgccgttaaaaataccggctcctgataatacgcctaataccgtaattaactggcggaagttacccgcctgtcctacgccgctggggccaaaagtgaccgccagcagtttaactaccagcaaacctacgccgatcttaatcagcgtagagcctgcggtccaaatagatgcttttgccaatgacatatcaggcgaagaaactcagtacgcggttaataatgattttctggttggcctcggtcagcatatagaagatcggtagacgcaccagacgctcactctctttggtggtaaagcaatcctcaccggataaacggccaaattcggcacccgccgggcaggcatgcaacggaatataatggaagaccgtcaaaatatcggcttctttcatatagctgataaaggccgaacgctcttcaatatcacgaagtttgatataaaacatatgagcattctgttcaacatcagcagggactattggtaaatcgatacggcctgcgtcagcaagaggcttgaatgcagcgtagtaattttgccacagagacagtcgacgttgattaatctgttcagcagcttccaactgcccccatagataggcagcctgtaaatcagccatcagatagctagaaccgatatcacgccaggtatatttatccacctgaccgcggaagaactggctgcggttggtgcctttttcacggatgatttcggcgcgatcgatcagagatggatcattaatcagcgttgcgccgccttctccacccgccgtgtagtttttggtttcatggaagctaaagcaaccaatatggccaatagtacccagcgctttgcctttgtaagtcgacatcacgccctgagcggcatcttcaaccacaaacagatcgtatttttttgccagcgccatgatggtatccatctcgcaggcaacgccagcatagtgaacgggcacaatcactttagttttatcggtaatcgccgcttcaattttggtttcatcgatattcatggtgtcgggacgaatatcgacaaataccattgttgcaccgcgcaatacaaaggcattagcggtggaaacaaaggtaaaactcggcatgatcacttcatcgccgggcttaatgttcagcaacaaagccgccatttccaacgatgcggtgcaagaaggggtcagcaagactttcgggcagttaaaacgctgctccatccactgctggcaacgatgggtaaaaccgccatctccgcaaagcttcccgctgttaattgcatcttgcatataacccagttcggagccaacaaccggtggtgtgttaaatggaatcatttcatcccctgcataaccaataagcggtgctctcaatagatgccccgctacgaatatagagacgcaaagctgcgatgttactcatctgagtggcgacatatagccgctgtaacccgtgatgctgacaccactgctttgccgccgacataagttttgtaccaataccttgccctgcggctcccggaaacgccgccagcaaaccaattcgagccgagccatcctgcaaattacgcaaagtgacaaacccgatagcctgattatggctatcgaccaccagcaaacattggtggtcgaaagttcccagtaccgctttttcggcccatagcgcgtagaaacgcccgctatcctgcgactcataccaaggcgcacggaaacgactaagagcaaaagcgcgggctgcggcgctgcgcaactgaggaatatccaattcagttgcgatccgaactgagcctgcagccagcatatcggaaaaggcggaactcgccgtcgttcccgaatggtcagcgacagaagcagtttccgtgccaattggcagtgaaagatcgatttcactttcaaccagacgaaaacccagcagattaagggcatcaacccaatccagacggtgcgcagggattttagcctgaaccaaagcataggcatccaattctgccgggttcagcaacggggcagaatcagataaattcagttttgcgctgtgtctctggaaaaattcactttcccagttcagcggttcaatattggcgcggacgagcatgcaataaatccagcagatatttaccgtaacccgtttttgcaagagcggtggcagcgcgttttacgccatcatcatccagccagccattacgccaggaaatttcttccagacaggcgattttaaagccctgacgcttctctaccgtttgtacgaaggtactggcttcaatcaggctatcgtgggtaccggtatctaaccaggcaaagccacgacctagtagctcaaccgttaactcaccgcgctccagatacatctggttgatggtggtaatttccagttcaccgcgggaagaaggtttaacctgcttggcaaaatcaaccacttgattatcgtagaaataaagcccggttactgcccaattggatttaggcacgcttggcttttcttcgatggaaagcgctcggaaattatcgtcgaactccaccacgccaaaacgctctgggtccatcacctgataaccgaaaacggtcgcgcctttctgtcgggcaacgacacttttcagtttagggctaaacccttgaccaaagtagatattatccccaagaaccagacagcaggattcaccgttaatgaactcttcgccgatcaagaaagcctgcgccaagccttctggcttcggctgctcggcataacttaggttaataccaaactcagaaccatcacccagcaaacgccggaaggaaggcaaatcttcaggagtggaaataatcagaatatcgcgaatgccggccagcattaagactgacaacggataataaatcatcggcttatcgtaaaccggaagcagctgtttagagacgccgcgagtaatagggtgtaaacgggtaccggaaccgcccgccagaactatgcctttcatagaaactcctgatttgacctgtaacaacgcgctgttcaaatgaagcagcgcgttagatggccgtacagtgacttttagacgtgctggcgaaatttaatcgctcagacccaaacgttcgccggcataagagccgtcctgtacgcgttgccaccaggatctgttgccaagataccaattgacggtcttacgaataccgctctcaaaggtttcctgcggacgccagcccagctctcgctcaatcttcccggcatcaatggcatagcgcatatcgtggcctgggcgatctttgacgtaagtgatcaaatcactgtagtgggcgattcccgcgggtttgttgggcaccagttcgtctagcaaagtgcaaatggtttctaccacttcgatatttttgcgctcgttgtgcccgccgatattgtaggtttcgcctactacgccctcggtcactacctgatatagcgcgcgcgcgtggtcttctacatataaccagtcgcgaacctgagcgccgttgccataaacaggcaaagacttaccggccagcgcgtttaaaatcaccagcggaatcagcttttcagggaaatggtatgggccatagttattggaacagttagtgaccaacgtcggcaggccataagtacgcaaccaggctctaaccaaatggtcgctggaagcttttgacgcagaatacgggctgcttggggcgtaaggcgtggtttcggtaaagagacagtccgtgccgtgcagatcgccatacacttcatcggtagagatatgatggaaacgaaatgcctgctttttctctgctgccagcgcctgccagtagtgccgagcagcttccaacagcgtgtaagtacccacaatattggtttctataaaagcggctgggccatcaatggatcgatccacgtggctttcagcggccagatgcatcactgcatctggctgatactgcgcaaagatacgatccagcgcggcgcggtcgcaaatatcaacctgctcaaacgcatagcgatcgctgtctgccacgacggtcagagattccctattccctgcataggtgagtttatcaaccaccacaacgctgtcggccgtgtcattgatgatatgtctcaccacggcggagccgataaaaccggcgccaccagtgaccagaatacgtctcaacgccatactcctttggtatcaacaatccactgttgcttcacttcttcaggtttaattgccttaaactggctgtgatcgaccagcatcaccagcacatctgcttgctgcagcgcttccgccgtgtttttcagcgtaacgttacctgctaatgatttcggcaattgctctacgttcggctcaaccaccaaggtttcacccgcatgccattctgcaatcaggtgtgcgatttctaccgccgggctttcacgtaggtcatcaatgtttggcttaaacgccagaccgaagcaggcaatttttacttctgatgcacgcttgtcgctgttcgccagacaatcagccaccgccgctttcacgcggtcgacaacccataaaggtttgccatcattgaccagacgtgcggtatggatcagacgcgcctgctgcggattttgcgaaacgataaaccatggatcgacggcgatacagtggccgccaacgcccggaccaggttgcagaatattgacgcgcggatggcggttcgccaaacgaatcagttcccacacgttaatgccctggtcggcacaaatcagcgacagttcgttagcaaaagcaatgttgacatcgcggaagctgttttcagtcagtttgcacatttcagcggtgcgggcattggtcaccacacattcgccttccaagaaaatcttgtacagctcactggcgcgggcagaacattttggcgtcataccgccaatcacccgatcattctgaatcagttcaaccatcacctggcccggcagtacgcgctctgggcaataggcgatattaatgtctgctgcttctccagcctgctgtgggaagctcaggtctgggcggaattcagccaaccactgagccatttgttctgtagcgccaaccggcgaagtcgactccagaatcaccagatcgcctttcttcagcaccggtgcaatagatttagccgcagactctacgtacaccatgtcgggttcgtgatcgcctttaaacggcgttggcacggcaatcaggaaagcatcggcagccaatggcttggtgaacgcctgcaaatagccgccttcaacggcaattttgacaactttatccaaatccggctcgacgatatgaatcgcaccgcgattaatggtctcgaccgcatgagcgttaacatcgacgccaatcacctttttcttgcgcgaggcaaaagcggctgcggtaggtaaaccgatatatccaagaccgataacagaaatagtttcaaaactcatagcgtcacctgatgattctttaatgcttctaggatgcgttgacaggcgtgcccgtcaccgtaaggattatgtgcccgactcatttggtgatatgcattttcatccaccagcaaatgggttacagcatctacaatttttttaacgtcggtgcccaccagcagaacggtgcctgaatctaccgcttctgggcgctcggtagtgtcacgcataaccagcaccggcttgcctagcgatggcgcttcttcctgaattccgcccgagtctgtcagaatcatataagcatggttcatcaggtagacaaatggcaggtaatcctgcggatcgatcagaatgatgttgtcgacaccgtgcaggatacggttaaccggctcgctgacgttgggattaaggtgaactgggtatacaacctgcacgtccgggtgattacgggcaatttcagccagtgcgctgcaaatgcgctcaaacccgccgccaaagctctcgcgacgatggcctgtcaccagaatcatttttttattggcatcgaggaaaggatagcgagcgtccagatccttacgcagtttctcgtctttcaacacccgatcgcgcacccaaaacagcgcgtcaatcacggtatttccagtcacaaaaatacgattatccggcagcaactcacgcaacaggttctgacgcgaattttccgttggcgcaaaatggtacatggccaaatggcctgtaagcttacggttggcttcttctggccacggagaataaaggtctccggtacgcaggcccgcttcaacgtggcctactggaattcgctgataaaacgcggccaagctggttgccaaagtcgtggtggtatcaccgtggactaaaatgacatccggtttaaattcggccagaacgggctttaaaccttccaaaatacggcaggttatttcagtcagtccctgtcccggcttcatgatattcaaatcataatcgggctcaatttcaaacaatcttaggacctgatccaacatctctcggtgttgagcagtgacgcagacttttgattcaaaggcttcatcctgagccaaggcatgcaccagaggagccattttgatggcttcaggacgggtgccaaaaacagtcaacactttcacagtgaatctcttttaggtcagttagccgcagacaacgcctgcaagttgggcgcttacgcgcccattagcaatttagtgctttacgccgggacgacgggccaatgccacgccagctccgactagtgcgccaatcgctccccacataatcatcaggaaagcgcgacgcgggctatcgcgagttaccggatcttccggagtacgcaggtaacggtaggtctggaatttctcttccagagtcggcccaacgtttaatgttgccagcatagcgcggttttgatcgtaatcgatatcaaagcttgggcctgatgctgccagagtttctaaacgcgcctgaagcataggtttgcccagcaggaacattttggaatccggcagttgctccgcaggcgtatccgtttggttacggctaataccctgtttttcggccactttcagcgcttgcttaaccgcattcagctcacgatcgtaaaccgcctgcgctacggcttcctgccgcttaacctgtgctttcattgactgagttcgcgcggcccatgccccttgaatttcatcatttaagtgactggcagcacgctggctagcaaaatcgacatactcacgtagcaatttgttcgagtcagtagcggtttccgcggtcagtttcacgctgtcgttcagcacttttttgtcatcgtgcggcgtgaattgaatattattgaccagctcatccagcaaagctgcatccgctttggcatccccttcctgacgttgcttgtagtaatcactcttcagccagaagtcacgacgggtatcgtaagccgctagttgaataatgaactcattataagcttcgtcagaaatactcggctgctcgctagccgaacctgaaactaaacgggaatccaggttacgcaaaaactgctgttgggaataatagccgcccagattattaactgttggcttatcggtaatcgcagtggcgctccactgctgcttcactaagtaggacacgcttagggcaatgacggcaaacagaaccgccataccgataatccaggctttaccacgccacagcgtgcagcaaaggccgcggatatctaactcgttatcgacagccagttcattgttagtagacgttttttctggtttcatcactgcccaaaagcctctgattaagatacatgcttattattagcccgccgcatccggcgcttaatacgcttgatgaaacgcgccactcgccaggctcgtttgatgcagtagccatacaggaagaatgcaagcaagaataatgccaacattacccattcaggaacaaataccagtcgttcgccgataacaccgacggccgccagcaaggccgcagccaaggtaattaggacaaatgcctgtcgggaagtgaagcctgcacgcatgatgagatggtggatatgctggcggtcaggcgagaacggactcatacctttacgcaagcggcgatacataatggcaatcatgtccattagcggaatcgcgataatccacagagcggtaaccggattgatcggatgggttttaccctgagtggtctgcaacagaatccaaatggcggtaaaaccaatcagcgtgctacccgcatcgcccataaagactttatagcggcgccccaacaaaccgagatttagcaagatatatggcgtaatcgccgcaatcatcgcaaaacaccaaaacgccagtgccatatgcccggcctgatagagcaagatgcccatcgcaccgaatgacacgcaagacagcccacccagcagcccgtcaataccgtcaaccatattgaatgcattgatagccgcccacacggcaaacagcgtaaccacgtaaccgaacgggccgagaaccatttcccacgggccaagaacgtgtccaaggctgtgcagatagagtccggcaaacgccatcattactacaccgactaaagcctgaacaaaagcgcggattttaacgctaatatcaaagcggtcatccaaagcaccaacgaacactaataaaccggcgcaagccagatagagtgaaccgaagggaatttgctggctggatatcaggaaggcaaaacagatacccgcatacacagaaataccgccgactaagggaatcagcccctgatggcgtttacggtaattgggtttatcgacgagaccgattctctttgccactttacgggcgatgaataaaaaagctaaagaaaacagcaggacgattagaatctctgtactcatggtgagtaatttcacgttaaacagctctctgcaaaagataaggcagcttagcatgtgagtaaacttactccacgatgcaaaacaacctttcagtcatttcctattagggtgacagcctatattgtttttacaacaatatcctcgttctattcacggagaacctagagctagatacgaaaatgccatcaccattaacggtgtagatctactgatcaaataaataagcgtatttatcgtatattccaaacgtgaaaaacgccacgactgagcgtggcgttttgttcgttttatttaaattacgaacgtctcatcatatcgaagaagtcgtcgttggtcttcgtcatagctaatttattaatgaggaattccattgcatcaatttcacccattggatggataattttgcgcagaatccacattttttgtaattcttcagtcgtggtgagcaactcttctttacgagtaccggaacggttgtaatcgatagcagggaatacacgtttctcagcgattttacgcgccaagtgcaattccatgttaccagtacctttaaattcttcgtaaatcacttcatccatcttcgaaccggtatcaaccagagcggttgcgatgatggtcaggcttccgccctcttccacattacgcgccgcaccgaagaaacgcttaggacgatgtagggcgttagcatccacaccaccggtcagaaccttacctgaggcaggcaccacggtgttataggcgcgagccagacgagtaatggagtccagtaggatgataacgtcttttttgtgctcaaccagacgtttcgccttctcaataaccatttcggctacctgaacgtggcgagacgctggctcatcaaaggtagaagcaataacttcacctttaaccagacgctgcatctcggtaacttcttccggacgctcatcaatcaacaataccatcagcacgcagtctgggtgattgtaggcaatgctggttgcaatgttctgcaacaacatggttttacccgcttttggcggtgctacgatcaaaccacgttgtccgcggccaattggcgaagccagatccaacacgcgcgccgttaagtcttctgttgaaccgttaccgcgttccatacgcaaacgtgaatttgcatgcagcggggttaagttttcaaacagaattttattacgggcgttttccggtttgtcatagttaacttcgttaacttttaacagtgcaaaataacgctcgccttcttttggcggacgaatcttaccggaaatggtgtcaccagtgcggaggttgaaacggcgaatttgacttggggatacatagatgtcgtcgggaccggcgaggtaggagctgtctgctgaacggaggaaaccaaatccatcctgcaatatctccaatacgccgtcaccgaagatatcttctccacttttagcatgttgcttcaggatagagaatatgatgtcttgtttacgcatccgggccaggttttccagccccatattttcgccaagtgtaatcagatcagaaaccggcgtattctttaattcggtaagattcataatggtgggttcttaaactcggggtatgtctcgaactttagtcgtgaatgggtatggcagcgtcatccgtgcctgtttaatggacattcaatctcggccttgtgtgctgcgcgagtaatagcttgcgcaaaattcgcactcaacgacggcaataaattgaaggtaccttagactgattttttaaaaccgttagactgtcaaaaaaccgattgagttcatatatattctcaacgcaaatgtttcgacatagagtaaaactttagattcaaactatttaggtgctacagaattttttagatgctacaaacctagattctactcacaggtatgttctatacgcagtggaataaacttaacacgcttctttgcaggcgtctagcggtcagtgtgaaaatcacacccaccgcaggacacccggcttttgacactaatatcgactacagattttcgtccaggaacgctttcagctggctcttggacagggcacccactttagttgccgcaaccgcaccgtctttaaacagcaacaacgtcgggataccacggatgccgtattttggcgcggtgcccgggttctgatcgatgttcaatttagcgatggtcagtttgccttcgtattcttcggcaatctcatccaaaatcggagcaatcatcttgcacggaccacaccattcagcccagaaatcgaccaacaccaggccagtggcttccagcacgtcagtggcgaagctgtcgtcactcaggtgaataattttatcgctcatgttctactccaaaggattgtgtctacctagttgatgtagcattaaccaacattaggttgactttatttcaccggatacgctttcgtaaagcaatagttagctgatattctaccacactatgagcaaaacacacttgactgaacagaagttttccgacttcgccctgcacccgctagttgttgaagcccttgaaaacaaagggtttcaatattgcacgccgattcaggcgttagcattgcctctcaccctgtctgggagagatgtagcaggtcaggcgcaaaccggtaccggaaagacgctagcattcctggcgtctacttttcattatttgctttcgcacccagcagaagagggtcgtcagactaaccagcctcgtgcattaattatggcaccgacgcgggaactggcggtacagattcattctgatgctgaagccttatcccagattaccggtttgaaactgggtctggcctacggcggtgacggctacgacaaacagcttaaagtgctggaaagcggcgtcgatattcttatcggtaccactggccgtttgatcgactacgcaaagcaaaactacattaatctgggcgctattcaggtagtggtactggatgaagccgatcgtatgtacgatttgggctttattaaagatatccgctggttgttccgccgcatgcctgcggtagaaaaacgtctgaatatgctattttccgctacgttgtcctaccgcgtacgtgaactggcgtttgaacagatgaataacgccgaatacgtggaagtggagccgttacaaaaaaccggccaccgcattaaagaagaactcttctacccttcaaacgacgaaaagatgcgcctgttacagacgctgattgaagaagaatggcctgaccgctgcatcatttttgccaacaccaagcaccgctgtgaagaaatctggggccatctggctgccgatggacaccgcgttggcctgctgaccggcgatgtcgcgcagaaaaaacgtctgcgaattctggaagatttcaccaaaggcgatttggatattctggtagcaaccgatgttgcggctcgtggcctacacattccgttggtgactcacgtattcaactacgacctgcctgacgattgcgaagattacgttcaccgtatcggtcgtaccggtcgtgctggcgaaagcggccattcaattagtctggcgtgcgaagagtatgcattaaacttaccggctattgagacctataccggtcacagtattcctgtcagcaaatacaatagcgatgcgctgttgactgatttaccggcaccaaaacgtctggcacgtacccgcaccgggaatggcccgcgccgtaattctgcccctcgccgtaacggcgcgccgcggaacaacaaccgtaaacgaccaggctgataacgcgatgctaagctccacctcactttatgctgccatcgatcttggctccaacagtttccatatgttggtggtacgtgaggtggctggcagtatccaaacgctggcccgaattaaacgcaaagtcaggctggccgcaggattagatgctaataaccatctgtcacatgaagcaatggaacgcggctggcaatgtttgaagctgttttccgaacagttgcaggatattccgcggcaacaaattcgcgtggtcgccacggcaaccttgcgtttggcctcaaacgccgaccaattcctgcaaacggccattgaaattctgggttgcccgattcaagtgattagcggtgaggaagaagcgcggctgatttatcacggcgtcgctcacactactggcgggccagaaaagcgtctggtggtcgatattggcggtggcagtaccgagctggtaacaggttccggcgctcaggcgtccatattggtcagtctgtcgatgggctgcgtaacctggctggaacgttatttcagcgatcgcaatctgcaacaggaaaactttgaccaagccgaattagcggcgcgtgagatgatcaaaccggtcgcggcacgttttcgtgagcacggttggcaaatttgcgtcggcgcttccggcacggtgcaggctttacaggaaattatggtcgcccaaggcatggacgaactgattacgctgccaaagctgcaacaactgaaacaaagagccattcactgtggcaagctggaagaactggaaatttcaggtctgacgctggaaagagccttggtattccccagcggcctatcgattttgatcgctattttccaggaattgggtatcgaaagcatgacgttggctggcggcgcactgcgcgaaggtctggtgtacggcatgctgcatttacctattgagcaagatattcgcagccgcactattcgtaatctgcaacgccgctatttgctggatattgagcaagcccagcgcgtcgcgcagttagcggataacttttttctacaggttgagaaacagtggaaactagagggtcgatgtcgggaattattgcaaaatgcctgtttgatccacgaaatcggccttagcgttgatttcaagctcgctccgcagcatgccgcctacctgattaggtatctggatctgcctggatttacccccgcgcaaaaactgcttctctccgctctcttgcaaaaccaaagcggcactctggatttatcactgcttagtcagcaaaacgcgttacccgtagtcatggcgcagcgtttatgtcgcttgctacgtctggcgatcattttctccagccgtcgtcgggatgacaccttaccagcggtaagattacgcgccaatggcgacactctgtgcgtgctattaccacaaggctggctgcagctgcatccttatcgtgctgaatcactggtacaagaaagtcactggcaaagctatgttcagtggcctcttactctggaagcgtttggttaagcattatctcgggcggttatagatagccgcccattatttctcccttttcttattcagtaaccctccctcaccactatttcgtctaaaaaaacagtaagcactcgatatgtgatcgccttcatcttaaaaataaaactatgtgtgtatttttatagaacagcgtttctattttaaaattatctcctccatcagaagacagcgctgtctgcgacaactctctccatttcaatgaggaataagaatgcgcgtacagcttcaacgtcgtcatcccctgaatatgctgttgattctttctggtttggcacttgcccctgccacagcattggccgaactgaaagcaccgcaaaatctacaggttcccacgctggcttatgacgaaaacagcttagtattagtgtgggaagcgccgcaagataacggtcaaatcgtcgattatcaggtgtattccgcagggaaactgctgggccttgccagtgaaaataatgaccgatactctccggccaaaccctatatcaatcatttctacgcaaatgataagcagcaatttcagcacaagattctgatacagaatttcaccgtacaggggctacaacctgacacgacttactcgtttagcgtcaaagcgcgctatgctgacggttcactgtcacctgacagtcaggtgattaccgcgaaaacaacggcgttacctcaggtgctgaatattcgtgatttcggtgccaaagacgatggaaaaaccctcaatacccaagcgattcaacaggcgatcaatagctgtaaacctggttgccgcattgatattcccgctggggtgtataaaaccggcgcgctgtggctaaaaagcgatatgacgttgaatcttgaggctggctcgaccttgctgggttcggaaaatccgacggattaccccgcaggctattatctttatagctattccaccgtccagcgtccggcttcgctgattaatgccataaatcctgatcagaccgcgccgggcaccttccgaaatatccgcatcgttggctttggaactatcgatggcaatggctggctccgcgcgaaaaccggcgaaatatcagatgaattaggcaataagctgccgcaatacgccgtgagcaaaaataccaaagtgcacgaagacggcattctagccaaaaatcaggttgaacaggctgtttccgcaggaatagatctaaaaacggcttacggccagaaacgatccagtttgatcaccttgcgcggcgtagaaaatctgtatctagccggattcaccgttcgtaatccggcatttcacggcattatgaatctggaaaaccataacgtggtggctaatggtttaatccatcaaacttatgatgctaataacggcgacggtattgagttcggcaatagtcagaatgtcatggtgttcaataacttcttcgatactggcgatgattgcattaactttgccgcaggcactggcgaaatggctcagcaacaggagccaatgaaaggagcgtggttatttaacaactatttccgcatgggccacggcgctatcgtcaccggcagccatactggcgcatggattgaggatattctggcggaaaataacgtgatgtatctgacggatattggcctgagagccaaaagtacccgctcaatcggcggtggcgcgcgcaacgtcactttccgcaataatgctatgcaagatatcgccaaacaggctgtcgtcatgacgctggactatgcggatagcaatgccaatctggattatcctccggcgaaaattcctgctcaattctatgattttacagtaagaaatgtgacagtgaataaccagacaggaaaaaacgcatccattgagattaagggtgacagtgacaaacaggcctggcaccgtctggtgcatttcgacaatgtgaaattcgatcgggtcacgccaacggcaatcagcgatttacgtgatagccagttcaatcaggttattttcacccagctacgtggcgaaaacccttggcatttcagcgcgataaaaaatgtaaccgtagatgggaaacccgtgacaccatagggttcatcaacagatttccctacccattatttcttggcatttgccaattgagcacgaatactggccagatgactctggcctttttgcatccgttcttccggcgtaatcactttacgctccgattcccagtccaaatcatcctgcggcaattccatcagaaaacggctaggttccggccgcattaattcaccgtattgccggcgttcccgacagtgtgtgaagaacagttcccgctgggcgcgagtgatgccaacgtaggccagacgtcgttcttcatccacattatcttcgtcgatactgctttggtgaggcagtagcccttcttccatgccgactaaaaatacgtagggaaattccagacctttcgaagcgtgcaaagtcattagctgcacctgatccaactcttcgtcgctttctccgcgctccatcatatcccgcagggtgaaacgcgtgacaacctgggtcaaagtcatttgctcgtccagttccgagccttccaacatttccgtcatccagctaaacagcatgttgacgtttttcatccgcatttctgccgctttcgggctgggagaagtttcaaacagccaactttcgtattccattccgtgaagcaaatcccgcactgcggcaataggttcacgctccaccagccgaataatactctccagccagtgggtgaaacgctgtaaagactctagtccacggcctgtcagatgctggctcaaacctaagtcaaagctggcgtgatacaggctcttgtttcggatattcgcccattcgcctagtttctgaatcgttgccgggccgatttctcgtttaggcgtattcacaatgcgcaggaaggcgctgtcatcgtcctgattggttaagacacgtagataggctagcaagtctttgatttcagggcgagaaaagaaagagtctccgccggaaatgcggtaaggaattcggttttgcaccaacaatttctcgaaaagccgcgattgatggttaccgcggtataaaatagcgtaatcaccgtactgagttttcttaataaagtgatgggcgatcagttctcccaccactctttcggcttcatggtcttcattattggcggtaataaccttcagcggttcgccgtaacctaattcggaaaacagtcgtttttcaaaaacgtgcgggttattggcgatcaaaatattggccgctttcaatatcctcccagaagaacggtagttttgttccagcttaatcacctgcaactgaggaaaatcttgattcagcaacaccaggttctgcggccgagcgccacgccaggagtaaattgactgatcgtcatctcccaccacggtaaagcgcgcccgattgcccaccagcaacttaaccatttgatattggctggtattagtatcctgatactcatctaccagcagataacgtagtttgttctgccagcgttcgcgcacttcttcgtttttttgcagcagcagcgttggcagagaaattaaatcgtcaaaatccagtacgttgcaggcttttaagtgatcgtcatataaggtatagcagtgagcaaagatcttatcgcgttccgaacgcgcctgtgcagccgcggcggccggagtcattagatcgtttttccaattagagatcgtcgagatcaactgctgtagctgagttttatcttcttccaaccacttgctggtaagatcttttagcaaccccatctgatcctgtgcgtcaaacagcgagaagttagatttcatccccagcgctttatattctttcttaatgatttccagccccaaagtatggaaagttgaaatcattaaaccgcgagcttctttacgccccagcgtttgcgccacgcgttctttcatctcgcgagcggccttattggtaaaggttacagcggcgatatggctgggcttatagccacactgacggatcaagtgcgcgattttattagtaattacacgggttttacccgagccagcaccggccagcactaggcagggtccggtgacaaattcgacggcttgttgttggctgggatttaatcgcatagcgctcggttactcacggttactctgtgggatggtggggaggaagagtgtagcagaaagaagcgggtgaaaaaaaacgcctgtcattttgctttcccgctttcaagccgccaaaagcttcaatcgtcggcaaaatacgctacactggcggccgattaaaggcgatattcattcaaattacattgtggtgataagtattatggcgaacaaagcttctgcgttgcatattctggtcgatgatgaaaaacaggcaaatgatattctggcgcagttgaacaatggcgctaatttccaggaattagccaagaaatactctaattgtccgtctaaacgtaacggcggcgatctgggcgagtttaacaagggcgatatggtgccagcttttgataaagcggtatttagctgtgaattgctacaaccttatggcccggtaaaaacccagttcggttatcacatcattaaagtgctgtaccgtagctaatattgctgagcttgaatgtaaaaaaaccggcacgcatggccggttttttatagcgaacatctcgagcactgacccatctcaaaatggccagcaaggtagcttgattagcccgcaaccgcgatgcgcttcatatccttcatatacccacgcagcttatgccctaccgcctcaatcggatggttacgaatcgcttcgttaacatcacgcaactgagcgttatctaccgcagtacccgctacgcttttgcccagatccccggcttgcagagaatccataaatttggctttcagcagcggtaccgctgcattagcgaacaggtagttaccgtattctgcggtatcagagataaccacgttcatttcatacaaacgcttacgagcgatggtattggcgatcaacggcagctcatgcagcgattcgtaataggctgattcttcgataatacctgaatcaaccatggtttcgaacgccaattctaccccggcttttaccatggcaatcatcagcacgccgtggtcaaaatattcctgctcggagattttaccttcgaactgcggcgcgttttcaaaggccgttttaccggtttcttcgcgccacttcagcagtttcacgtcgtcttctgcccagtcggccatcatgccgctggagaatgcgccggaaatgatgtcatccatatgtttttggaacagcggcgccatgatttctttcagttgctctgacagcgcgtaggcacgcagtttcgccgggttggacagacgatccatcatcagagtgataccgccctgtttcagcgcttcggtgatggtttcccagccgaattgaatcagtttttcagcgtaggctgcatcagtaccttctgccaccagtttgtcgaagcacagcagggaacccgcttgcaacataccgcacagaatggtttgctcacccatcaggtcggatttcacttccgcaacaaatgatgattccaacacgccagcgcggtgaccaccggttgcagcagcccaggctttcgcgattgccatgccttcgcccttaggatcgttttccgggtgaacggcgataagcgttggtacaccgaaaccgcgcttgtattcttcacgtacttcggtgcccggacatttcggcgcaaccatcactacggtaatgtctttacgtacttgctcgccaacttccacgatattaaaaccgtgcgagtaccccagcgccgccccgtctttcatcaacggctgaacggcctgaaccacggcggaatgctgtttgtctggcgtcaggttgaccactaaatcagcctgcggaatcagttcttcgtaagtgccaactttgaagccgttttccgtcgctttgcgccatgatgcccgcttctctgcgatggcttctttacgcagcgcgtaggctacgtccaggccagagtcgcgcatattcaaaccctgattcagcccctgagcaccacaaccgatgatcaccacttttttacctttcaggtagttcgcttcatctgcaaactcttcacgtcccataaagcgacatttacccaattgcgccaactgctgacgcaggttcaatgtgttgaaataattagccatagtggtactccgttcgatgttgtgttgcgttattttcacatcccccaatctgtgtgagggattctcttgaattcactatatgtcaggaaatccgttgctgaaattgatatatttacaaggtgtcgttgcagattttgcaatataacaatttcctcgccaacgagagccagcgctatggatttacgtgacctgaagctgtttttacatctggctgagagccgccattttggccgctcggccaaagcaatgcatatcagcccatctaccctttcccgccagattcagcggttggaagaaaccatagggcagccgttgtttctgcgggataaccgtaccgtgcaactcaccgatgccggcacccagttgaaagcctttgctcaacaaaccttattgcaatatcagcaattgcgtcatgcgctggggcagcacgggccgtcactgagcggcgagctaagactgttttgctccgttaccgccgcctacagccacttgccgccgattctggatcgttttcgcgccgaacacccactggtggaaatcaaactgaccaccggcgacgccgccaacgccgtagacaaggtgcagtctaacgaagccgatttggggattgctggtcgccctgaaaccctgcctggcacggtagaattcacccaaatcggcgagattccattagtactgattgcgcctgcgctcccctgcgccgttcgtactcaggctgctgaagctcatcctgattggaacaatattccgtttatcctgccggaacacggcccgtcgcgaaaacgcatcgatttatggttccgccgccatcgcattactaacccactgatttacgccaccgtttccggtcatgaggcgattgtttcgatggttgcgctcggttgcggtattgccctgattccggaagtggtggtggaaaacagcccagaacccgtgcgaaaccgtatttctttactcgataatatttcgctggttgaaccctttgagttgggagtctgcgtgcagaaaaaacgtttaaacgaacccttgatcgaggcattttgggggctgctgcacagccccgtttgatgcaaattaaccggcgaggaagaatctaaacgccggattatcggtttcatcgtggcaaatgtagcccagcgcagtcaggtgctgttcaaattccggctcgatctcggatagctcgaagcccgccagcacccggccaaaatcagtgccgtggctgcgataatggaacaacgagatattccagtgggtaccgagcgtattgaggaatttcaacagcgcgccctgtgattccgggaattcaaaactgtacaaacgttcgcgcagcggcttaggaggacgaccgccaaccatatagcgcacatgcagtttggccatttcatcgtcggacaaatccactacctgataaccatccgcctgtaattcagcgatgatttcagcccgttcggcgaatcctcgggtcaaacgcaccccgacaaaaatgcaggcgttatccgcgtccgcgtagcgatagttaaattcggttaccgcccgaccgcccagcaattggcaaaagcgcaggaaactgcctttttgctcaaggatcgttacggctaacagcgcttctcgctgctcacctagttcacaacgctctgaaacataacgtaaaccgtggaaattaacgttagcgccagaaagtatatgagccagacgttcaccttgaatattatgctgctgaacatattttttcagccccgccaacgccagcgcaccggaaggttccgcaatcgcacgaacgtcttcaaaaatatctttgagcgccgcgcagatggcgtcgctatccacggtgataacgtcatccagatattcctgacacaggcggaaagtctcgtcaccaatgcgtttcactgccacaccttcggcaaacagcccgacgcgagccaaatcaaccggagctcccgccgctaatgccgcttgcaaacaggcagagtcttccgcttccacgccgatcactttgatttgcggcatcagttgtttaattaataccgccacgccagcggccagaccaccgccgccaacgggaacaaaaacccgatccaaatgggcgtcctgttgcagtagttccatcgccagcgtgccttgtccagcaatgaccgccggatgatcgaaaggcggtataaaggtgtaaccctgctggcgggaaatttcgatggctttagctttggcctcatcaaaattggcaccaaacaacagcacttcgccaccaaagctacgcaccgcatccactttgatgtctgcggtggcaaccggcatcacaatcagcgatttaatgcccagtttactagcagaaagcgccacgccctgtgcgtgattacccgcagaagcggtcactacgccgcaggctttctgttcttcattcagccccgccagcatggcgtaagcgccacgcagcttaaaactgtgtaccggatggcgatcttcccgcttaaccaaaatggtgttactcaagcgagatgaaattttctccatcacctgtaatggcgtgacctgcgtaacttcatataccggcgcgcgcagcaccgctcgcaggtactctgcgccactgggcgcatcgggtaacgcttgtgattccgccatagcccttaacctcccagcttacttttatcacgaacagcgcctttatctgcgctggttgccagtgaggcataggcacgcaaagcgtaggaaacctggcgtacgcggtttttaggtgtccaggcagcggagccgcgagctaattcggcttcatgacgagccgccagttcagcggccggtacatctaataccatgctgcgctgaggaatatcgatattgatcatatcgccgtcctgcactaggccaatcaggccaccgctggccgcttctggcgaaacgtggccaatagacaaaccggaagtcccaccggagaaacgcccgtcggtaatcaaagcgcagcttttgcctaagcccatagatttcagataggtcgttgggtacagcatttcctgcatgcccggcccgcctttcggcccctcgtaccgaataatcactacgtccccggcaaccacttttccacccagaatcgcctctacggcagcgtcctggctttcataaactttggctgggccacggaaagtcaggctttctttatccacaccggcagtttttacgatacagccgttttcagccatattgccgtacagcacggctaagccgccgtcctgactgtaggcatactcgcgcgtacgaatgcaaccttcctgacggtcggtatccagcgacggatagcggcaatcttgcgagaaagctttggtggtacgaatacccgcaggccccgcggaatacatgcttttgactttttcatcgctggtcagcataacgtcataggctttcagagtttccggcagactcagccccaatacgtttcggacttcgcggttcagcaagccggctcgatccaactcccccaagatccctacaacaccaccggcacggtgcacgtcttccatatggtatttctgagtactcggcgccactttgcataaatgcggaactttacgcgacagacgatcgatatccgtcatgctgaaatccacttcaccttcctccgccgccgccagcaagtgcagaacggtattggtagaaccgcccatggcgatatccagcgtcatggcgttttcaaacgcagccttgttggcgatattgcgtggcagcgcactgacatcatcttgctcgtaatagcgtttagtcagctcaacgatatgtttgccggcatcgaggaataattgtttacgatcggcgtgagtcgccagcaatgaaccgttacctgggagcgctaaacctaaagcctcattcaggcagttcatcgagttggcggtaaacataccggagcaggaaccgcaggtcgggcaggcggaacgttcaatttgcgcgctatcttcgtcgctgacgttcgggttcgcgccctgaatcatcgcatcgaccaaatccagcttgataattttgtctgacagcttggttttacccgcttccattgggccaccggaaacgaaaataaccggaatattcagacgcagagacgccatcagcatccctggggtgattttgtcgcagttggaaatacacaccatggcgtcggcacagtgcgcattaaccatatattccacggaatccgcgattaactctcgtgaaggcagagaatagagcatgccaccgtgtcccatggcgataccgtcatccaccgcaatggtattgaactcttttgccacgccgcctgacgcttcgatttgctcggccaccagcttgcctaaatcgcgcaaatgaacgtgtccaggtacgaattgggtaaaggagttaaccaccgcaataattggtttgccgaagtcatcatcggtcatacccgtagcgcgccaaagtgctcgggcaccagccatattgcggccatgagtggtggtatgggaacggtacttaggcattatctcttcactcctgtgtcttttataaagcaggtggcgaacgaaccacccgcgggttctgtctgtcactttttagttattattgattgataggatccagccagccgtacttgtcttcagtttcgccggtgaacaggccaaagaacgcctgctggattttctcggtaattgggccacgtttacctataccgacctgaataccatcaacgctgcgtactggggtaatttcggcggcggtgccggacataaacacttcgtcagccagatacagagattcgcgagacagcacctgctcacgcacttccaggcccatatctttagccagcttgataatggcatcgcgggtaatacccggcagagcggatgaggtaaatggcggagtgaacaatactccgtctttcacttcaaacaggttctcgcccgcaccttcggacaagaagccgtgaacgtccagcgcaatcccttcctgataaccatgacggcgcgcttcgctgcccaccagtaaggaagaaaggtagttaccaccggctttagcggcagttggaatggtattcggcgcaacgcgattccaagatgaaaccattgcgtcaatgccctgtgccagcgcttcttctcccagataagcaccccaagggaatgcggcgatgataacgtcggttttgtagccttccggcggattaacgcccattcccacgtcaccgataaacaccagaggacggatgtaggcgctagtcagtttatttttgcgcagcgtctcgcgacaggcttccatcaactcatcgacggattgtgaaactggcatccgatagatcttggccgaatcatgcaaacgctgcatatgttcgcgatggcggaatacaaccgggcctttatgcttggtttcatagcaacggacaccttcaaagactgatgttccgtaatgtaacgcatgagacattacgtgaactttggcttctgcccacggaaccatttcgccgttaaaccaaatgtaatcagctttcttagtcattctgtactttccttctagcgcctcaggcgcgtatttgtaatgtattggtctgctggatttctacactcgcaacatccaacaacttattcaactgagaagacagtaaatctaccgaacgttggctagcaacggtcagctcgatattaatattttcgttattaaggataggcgacatattcatagcacaaacctgaaagccgcggtggcgcaccactcgcaatacgcgctctaacatttcagggcggaagcgggcttggatcgagagctgatgttgcatcatgaaattttctccagcatggtttcgttacctgcgcccggcggaactaacggccagacattttcgagttcgtcgatggaaacctgaagcaggtacgggccggtactgttaaacagagcgtccaatgcggcatcgacttggtctttgcgggtgatacgttggccgggaatatcaaaagcgctggccaaagtgatgaaatcggggttatcggataagttggtctcactgtagcgggcatcaaagaacagctgctgccactgtcgaaccatgcccaaacgctggttatccaacaaaacgatcttcagcggcaactgtttgcgctttatcgttcccagctcctgaacattcatcataaaggagccatcgccggacacgcagataaccatgtcgtcccgacgagccatttgcgcaccgacggccgccggaacaccaaagcccatcgtgcccaacccgctagaagtgatgaagttttccggacgggtaaaactcatatgctgtgcagtccacatttgatgctgaccgacatcggtagtgataacggtttcaggccctttacgatcggaaatctgtttcagtaacagcggcgcataaattgcttgccccggatggtcataacgccagctatgctgctgcttcaacgcaataacttcatcgcgccacggctggatgtccagaggttgctgcaacgcgggaagcaaggttttcaaatcaccctgcaaagcaacgtgagcctgccgcagtttgttcaactccgtcggatcgatatccatatgaataactttggctttcggcgcgaacgcgttcaacttaccggtcactcgatcatcgaaacgtgctccgacggcgatcaacaaatcgcactcctgcaccgccagattggctgccttagtgccgtgcatacccagcatgcctaaatagcaaggatgctcagcgtcaggggcacccaaccccttcaaagtcactacggcgggaaccccggtttcagcgataaacgctcgcaaggcaggcaccgcctgtgccatacctacgccaccaccgacataaacgatcggttgtttggccgcacttaacatgtcgtaagcctgctggcgttcggcactggaatccagatagtgttcttccaccgacagcaaatgcggatgtaactctgcgacagctaactgaatatctttcggaatatcaatcaaaaccggcccagggcgaccgctactggcgatggcaaaggcttcagccataatgcccggcaacgcgtctaaagactcaaccagaaaactgtgtttggtacaggccaaagacagccccagcacatcaatttcctgaaaagcgtcggtgccgattaaggcagaacccacctgaccggtgatagcgataatcggaacagaatccaataacgcatctgccagacctgtgatcaagttagtggctccggggcctgaagtggcgatgcacaccccgacctttccggttgcacgagcataaccgatggcagccattactgccccttgctcatggcgacacagtagatgttcaacgccaccgtcatacaaggcatcgtagactggcataattgccccacccggatagccgaataccgtctctaccccttgcgcacgtagcgcttgaaccacccactgagcaccattcatagttatttccccgaacttttgcgagcgacacaggattttattctgttgtgcattttacgttcaccgcgtctttttaccggccaataaaaaacccccggacctttcggtgcgggggttctcttgtgattaaggcttgatttttatgcctttcttcgtccaagtgcagccccgcacggtgggataataatcaccaccacgctaattaggactaggttaatcacttggacgaaagctttcataatcggttgttcacatgtctgttgtcgaacgaatacctacagagttatcacagttattatcgctatgacaatatttttttaaaaagtcattttgtgacccaagactacaattgcaataattgtgttaattatcaaacgataaaaccgatatttctttccctgatttttgtacagaaaatttacgcttaacgtccccatgcttaaaaaaatgtcagagatacttttgcactgagcctgaaatttcttcataaccgagacgtttttacgataggccacgcaaaattcatgtcttccctcgtaatcaaaacgatagttttcgcgccttctcgcaggctaaacaccaccctaatgacaaaaaaactcaattcggcaagataccaaacatcagaagggggaaaactatgtcactggccgtcatccatacccgcgcttccattggcgtacaagcacctccagtcaccgttgaagtgcacattagcaacgggttaccggggctgacattagtcggattacccgaaacaacggtgaaagaagcgcgggatagggtacgtagcgccttattaaacagtggatttacctttccggctaaacggattaccgtcagtctggcgccagcagacttacccaaagaaggtggtcgctacgatttgccaatagccttagccatcctcgcagcctcagagcagatccccgtagataagctaggtcaatatgagtttcttggtgaactcgccctgtcaggcggtttacgcagcgttagcggcgctatttcagccgctctggccagtacaggcgcctctcgtctgttaatactgccctgcgccaatgaaatggaagttggcttaatcgtcaaaggaaacagtttggttgcagagcatcttctggctgtttgcggttttctgcgtggagaaggctcactttcctccccaaaacaagcaagtgattggcaggaatgggataacacactcgacctgcaggatattatcggccagcaacaggctaaacgcgcactggaagtcgccgctgccggaggacataacttactgttacttgggccacctggcaccgggaaaacgatgttagccagccgattaaatggtttactgccacccttaagcaatcaggaagcactggaaactgccaccgtagccagcttactgcaagggcatcaggctcccacgcattggtgcaagcgcccatttagatcaccacaccatagtgcatcaatggcagcgttaattggcggcggttccatacctcgtcccggagagatctcgctggcacacaacggcgtgttatttttggatgaactgcctgaattcgagcgcaaggtactggactcattacgggaacccttagaatctggcgaagtggttatctcgcgagcaacggcaaaagtgtgtttcccggccaaaatacagcttatcgccgcgatgaaccccagccccagtggacattatcaggggcgacacaatcgcgcacagccacagcaaatactgcgttaccttgccaaattatccggcccattcctcgatagatttgatttatccattgaagtgccattgctaccgaaaggtttattgaggatgcaaaaaaatagcggggaagatagcgcaaccgtcaggcagagagtattacaggcaagagaaaaacaattgcatcgttcaggaaagataaatgcccaactcaacagcaaagaggttgctcgattttgtgcggtcacgccgcaagacgcacaatttcttgaacaagtgctgctgaagctcggtttatccgtacgagcctggcatagaattttgaaagtcgcgcgcacgctggccgatttggcacaacaggatgacattcaaaagccacacatttctgaagccttgagctatcgttgtatggatcgtttactgttacagctacacaaagcgttgacgtaaaaatggggctttcgccccatttctattagtcatcgctatcgacatagtcttccgttgcatctgcctgcggtttaccgccagacagcgtatggaagcgctttggacgccggattcgggtgatgtatttggaccacactttttccgcatcgctaacaggctcgcgctcgccacgacaaacggcaacaaacagttgctcttcttcgtttgctggctcacgtttgcctaaatccagctcgttgaaagcatagccatggcgctctagcaattgcgcctctttaatggtgaaatcaccgtgacgcgagaacccgcgaggatagtgtttgttatcaaaaaaacgattggttgtgatgaagctatccgccatctgacacgctcctaattctgtcatggtcgtgctgtttatggcgcggagtattagataggcttgacatcgtgtaaaacaaaacatttaaatcttaacgacaaaaaaaattggagataggtgtggacaccgaattactgaaaacctttttggaggtcagtagaacccgccactttggccgcgcagcggaatctttatacttaacacagtcagcagtgagttttcgaatccgtcagttggaaaatcaattaggtgcaagtttattcactcgccaccggaataatattcgtctgacgccagccggcgaacgtttggtgccctacgcagaaaccttgatgaatacctggcagttggccaagaaggaggtcatacactctcttcagcatactgagctatcgattggcgcaacggcatcactatgggaagcctatctcactccatggttacagacactctatctccaacgagaagggctgcgactcgaagctcgtattgcgttacgccagtctttagtgaagcaattgcatgaacggcaactcgaccttttaatcactaccgagccgcccaaaatggacgaattagccagccaactgttagggaatttttcattgcggcttttttcatcaggtcagcaagataaaaccgaagaaatgccgtatataaaactggagtggggggcagattttcatcaacaggaaaatcgcctgttagaccatgagcaaatgccagttctgacaacgacttctgcccatttgacgcgacaactcttagacacgactggcggctgtgcatttttacctgagcattggcaaaaagattacccgcagcttgttgctaacccggagatccccgcaatagtgaggcctatgtacgcggtgtggctacaaaatagcgatcagcagatattaatccgccaattattaaaaactccgatgaataacgccactgaaggggccacacggagttaatcgagaaacgcttagcccatgattgcggaatcatataaaaagctctcattgccttctgggcggcaataaagcgcaatgacagaacggcaatggtcatcttccccaccatgaaccgacagtaccgcgaaagagaacataacccaggattaagttctaaatcagcacgctaaacagcgtgccaacaccctagttaattaggttgccatctatcaccatcgctgcgagcacattctattctgcttcgctgagaaacaacgcttagcctatcgagatggcaggaagtgaaagtaatttcagataatctagcgagcattctggatagcatatagacctctgtactgatgtatttgtatccgtacgaatctccccattccagagcgactatttccatcaatcgcgcaaacgtggcgcccaaaatacggggaaaaataccaaagccgcggctaacagcataatcattgctaagggtgtaaaatagtttctatagtgaatacagtgcaaccaagctatccaatcatgggaataacgaactgggaaccaatgaacgacagaccaatctgattgcacctaaaggcaatactcaactgacttgttgctgataccaaactatccataacagactgtttaatattgttttgtgcattactattcgcaatagacctgaacagatatttcccgcataagtgattgaataataagaatattgccgttttaatccggcttcctcgcctcgccatatatcgacaattgtaagcgtaatgcctcgttttctatcattatgtaaatactttcgtttccacaaacaccctgtctctttgaaaccgacgttaaaaaaatcacgactgagaaacaacctgacctgcagtgcatatagtcgttaccacaccagctgcaaacattggtgtcaattttcttatcacagggttccttcacggcactatcatctcaaggtgacaggtaacatttctatattattcaaaaaataagcagagaattcataaacaatctgagtgggtcagaattgattcaatctttattgaagagagacaaatgcagattattaattaattctatatacaagttattgtagtgataataagtagaattccactataaattaacaatgtgctgtacgaaattggccttaaaaatgtaattaattaacactggctctttgaattttaagattatttaatatatttaacgagaaaatgagggctacttcggcgggatacgaatgaaaatcagacaataacaggaggtcaggaggtcaggaggtcaggaggtcaggaggtcaggaggtcaggaggtcaggaggtcaggaggtcaggaggtcaggaggtcaggaggtcaggaggtcaggaggtcaggaggtcaggaggtcaggaggtcagggtaatggataataactgcaaaagtgtagcttttatttgtttgatccaaataaaaaacccctcgctttcgcgaagggttatttatttggcaggggcggagagactcgaactcccaacacccggttttggagaccggtgctctaccaattgaactacgcccctaaaagagggtggcggaacggacggggctcgaacccgcgaccccctgcgtgacaggcaggtattctaaccaactgaactaccgctccaccgattctgttacttatacttccgtatatattcccgttagggccagcatgtccttgctgtttagccaccagatgtcactctgataacttgtgtttgatgcctggcagtgtcctactctcgcatggggagaccccacactaccatcggcgctacggcgtttcacttctgagttcggcatgggatcaggtgggaccaccgcgctattgccgccaggcaaattctgtttcaatcaacccgccacgtgatttacaccacacagccagtcaatccaatctgttaacaatgctgaaaatcaaaacgctctctaaaacaccttcggtgttgtaaggttaagcctcacggatcattagtactggttagctcaatgcatcgctgcacttacacacccagcctatcaacgtcatagtctttaacgttccttcagggggcttaaagccccagggaagactcatcttgaggcaagtttcgcgcttagatgctttcagcgcttatcttttccgcatttagctaccgggcaatgccattggcatgacaacccgaacaccagtgatgcgtccactccggtcctctcgtactaggagcagcccctctcaatcttccaacgcccacggcagatagggaccgaactgtctcacgacgttctaaacccagctcgcgtaccactttaaatggcgaacagccatacccttgggacctacttcagccccaggatgtgatgagccgacatcgaggtgccaaacaccgccgtcgatatgaactcttgggcggtatcagcctgttatccccggagtaccttttatccgttgagcgatggcccttccattcagaaccaccggatcactaagacctactttcgtacctgctcgagccgtcactctcgcagtcaagctagcttatgcctttgcactaacctcacgatgtccgaccgtgattagctaaccttcgtgctcctccgttactctttgggaggagaccgccccagtcaaactacccaccagacactgtcctcaccccagattatggggccgagttagaacatcaaacattaaagggtggtatttcaaggttggctccacgcagactggcgtccacgcttcgatgcctcccacctatcctacacatcaaggctcaatgttcagtgtcaagctatagtaaaggttcacggggtctttccgtcttgccgcgggtacactgcatcttcacagcgagttcaatttcactgagtctcgggtggagacagcctggccatcattacgccattcgtgcaggtcggaacttacccgacaaggaatttcgctaccttaggaccgttatagttacggccgccgtttactggggcttcgatcaagagcttcgccttgcggctgaccccatcaattaaccttccagcaccgggcaggcgtcacaccgtatacgtccactttcgtgtttgcacagtgctgtgtttttattaaacagttgcagccagctggtatctgcgactggcttcagctccgagagcaagtctcttcacctagcgccagcgtgccttctcccgaagttacggcaccattttgcctagttccttcacccgagttctctcaagcgcctgagtattctctacctgaccacctgtgtcggtttggggtacgatttaatgttacctgatgcttagaggcttttcctggaagcttggcatcaactacttctgcaccgtagtgcatcgtcatcacgcctcagggttgatggttttccggatttaccaggaatacccccctacacgcttaaaccgggacaaccgtcgcccggctagcctagccttctccgtccccccttcgcagtaacaccaagtacaggaatattaacctgtttcccatcgactacgcttttcagcctcgccttaggggtcgactcaccctgccccgattaacgttggacaggaacccttggtcttccggcgtgcgggtttttcacccgcattatcgttacttatgtcagcattcgcacttctgatacctccagcagtcctcacagactaccttcaacggcttacagaacgctcccctacccaacaacacctaagtgtcgctgccgcagcttcggtgcatggtttagccccgttacatcttccgcgcaggccgactcgaccagtgagctattacgctttctttaaatgatggctgcttctaagccaacatcctggctgtctatgccttcccacatcgtttcccacttaaccatgactttgggaccttagctggcggtctgggttgtttccctcttcacgacggacgttagcacccgccgtgtgtctcccgtgataacattcttcggtattcggagtttgcatcggtttggtaatccgggatggacccctagccgaaacagtgctctacccccgaagatgagttcacgaggcgctacctaaatagctttcggggagaaccagctatctcccggtttgattggcctttcacccccagccacaagtcatccgctaatttttcaacattagtcggttcggtcctccagttagtgttacccaaccttcaacctgcccatggctagatcaccgggtttcgggtctataccttgcaactagacgcccagttaagactcggtttccctacggctcccctatacggttaaccttgctacaaaatataagtcgctgacccattatacaaaaggtacgcagtcacaccacgaaggtgctcccactgcttgtacgtacacggtttcaggttctatttcactcccctcgccggggttcttttcgcctttccctcacggtactggttcactatcggtcagtcaggagtatttagccttggaggatggtccccccatattcagacaggatgtcacgtgtcccgccctactcatcgagttcacagcatgtgcatttttgtgtacgggactatcaccctgtaccgtgcgactttccagacgcttccactaacacacaaactgattcagactctgggctcctccccgttcgctcgccgctactaggggaatctcggttgatttcttttcctcggggtacttagatgtttcagttcccccggttcgcctcgttagactatgtattcatctaacgatagtgcaacgaattgcactgggtttccccattcgggtatcgtcggttgtaacgcttcatatcagcttaccgacgcttttcgcagattagcacgcccttcatcgcctctgactgcctaggcatccaccgtgtacgcttagtcgcttaacctcacaacccgaaggtgtctttcgacatcatcgtgctgcgattattgagagactctacctgcaggtgactccttgtctcggtaaatctacggagagacaagttttagctgcagtgtttcaattttcagcttgttccagattgttaaagagcaatatttcacaacatactgtccaccttgcggcagcaatatattttgaaatagttttatatggtggagctaagcgggatcgaaccgctgacctcctgcgtgcaaggcaggcgctctcccagctgagctatagccccatataaaaagcaaataccttattgctgcaactcatgtccagacaaggcgcagacacgcacgtttattgttataaacgaatgtgacggtaacgcactacagggatgagttggtgggtctgagtggacttgaaccaccgacctcacccttatcaggggtgcgctctaaccacctgagctacagacccaacaaggtactaaagcccgactaatctctcagcccggccttatttgctcgttactttctatcagacaatctgtgtggacactgcgcaatgcgtatcattaggtaaggaggtgatccaaccgcaggttcccctacggttaccttgttacgacttcaccccagtcatgaatcacaaagtggtaagcgccctcccgaaggttaagctacctacttcttttgcaacccactcccatggtgtgacgggcggtgtgtacaaggcccgggaacgtattcaccgtagcattctgatctacgattactagcgattccgacttcatggagtcgagttgcagactccaatccggactacgacagactttatgtggtccgcttgctctcgcgagttcgcttcactttgtatctgccattgtagcacgtgtgtagccctactcgtaagggccatgatgacttgacgtcatccccaccttcctccggtttatcaccggcagtctcccttgagttcccaccatgacgtgctggcaacaaaggataagggttgcgctcgttgcgggacttaacccaacatttcacaacacgagctgacgacagccatgcagcacctgtctcacagttcccgaaggcaccgaagcatctctgctacgttctgtggatgtcaagagtaggtaaggttcttcgcgttgcatcgaattaaaccacatgctccaccgcttgtgcgggcccccgtcaattcatttgagttttaaccttgcggccgtactccccaggcggtcgacttaacgcgttagctccggaagccacgcctcaagggcacaacctccaagtcgacatcgtttacagcgtggactaccagggtatctaatcctgtttgctccccacgctttcgcacctgagcgtcagtctttgtccagggggccgccttcgccaccggtattcctccagatctctacgcatttcaccgctacacctggaattctacccccctctacaagactctagcttgccagtttcaaatgcagttcccaagttaagctcggggatttcacatctgacttaacaaaccgcctgcgtgcgctttacgcccagtaattccgataagcgcttgcaccctccgtattaccgcggctgctggcacggagttagccggtgcttcttctgcgagtaacgtcaatcacttcacgtattaggtgaaatgccttcctcctcgctgaaagtgctttacaacccgaaggccttcttcacacacgcggcatggctgcatcaggcttgcgcccattgtgcaatattccccactgctgcctcccgtaggagtctggaccgtgtctcagttccagtgtggctggtcatcctctcagaccagctagggatcgtcgcctaggtgagccattaccccacctactagctaatcccatctgggcacatccgatggcgtgaggccctaaggtcccccactttgctcttgcgaggttatgcggtattagctaccgtttccagtagttatccccctccatcaggcagtttcccagacattactcacccgtccgccgctcgccggcaaagtagcaagctacttcccgctgccgctcgacttgcatgtgttaggcctgccgccagcgttcaatctgagccatgatcaaactcttcaatttaagatttgtttgatttgctaccgaagtagcgatgctcaaagattactttctgcaaatatgcattcgaaccgaagttcaaatgtttactgctttggtcactcttcaagacttgatatttcttctgcctgccgaaacaggctttgatatcgtcttgcgagtgcccacacagattgtctgataaattgttaaagagcgttcgttacccgttcgcttgcggcgaatcttacggtaacgcgggaggcagataatacgctttcccgctgaagtgtcaagcttttcttttcaactttcgttttaagaaccggcgtttccgcctgcttaacacttcctgacccggcgaagtttgtttcgttgttcccggtcagtggaggcgcattatagggagttcctgacaggctgcaacccctaatttcaaataattttccaaccggcttttttttaggcaaaactccattaaattgcgagttttttcagcattggaaagccataaccctgtaaaacgggcaataaagcatcagtatccgcatctaacgccatgcaataagccacattatcttcctgagtagaaatgacattctcttgtgaagaaatcagccaggcagttctgcgggcaatcgcagcaccggaatcaaccattcgcgtcccctctggcaacacctgcgccagctcttcagctaatagagggaaatgagtacagcctaataccacggtgtccggcggctcacgcatactcagccacggattaaggattttctttaatgcagaaagaggcacttccccaccgtgtaatttggtttccgccagttccaccagctcagatgaacccaacagctcgattttgcaatcagtcgcaaagcgcgcgatcagatccagagtatatgaacggtgcacagttgcccgagttgccaatagcccaacgacaccattgcgggttaaccgcgccgcaggcttgattgcgggtacgacaccaacaacagggaaagagaagcgctcacgtaaagctgggagggaaacggtgctggcggtattacaggcgatgacgacaatggcaaggggatgttgttgctgaaccgcagtgacgatctctactacacgctcgacaataaactcttcggacttctctccataaggaaaggcgacgttatcgaaagcatatatatagtgaagatccggcagaagctgccgaatctcttggtacacagacagcccgccgacgccggaatcaaaaatcagcgccgtcggacgaatggaagtgtctgccttagaagttatagcttccagtgaagtagtattcgcgtcctggggtttggtagccataaaccgtctcataatctttatcaaacaggttggcgattctaccacgaaccgtaagatgagaggtgactggatatgacacagcaagatcccacaagcttacaccaccgagttttaccgttctttcagggtaaacactgtagtctttgtcataacgctgcccaagatactgataggttatagaccaatccaaatcagcaacttgccagtccaactggtatttaacctgttgtttagcacgacgagtcagaacttcattagtttccgcattgcgtggatccagatattccaaagtaagctgatgcgataacggtccggtatcgaatgaacctgtccattccacgcccttaatggtggcttgattgacgttgaaatagctactggtcagattgctgtaatcaataagttgttcaatatcattacggtaagcggacaagcgccagtttaacgccccggtcagcccttcgatacccccttcccattgcttgctttcttctggcttgagattggcattaccaccgaaagcactatatagctgcatcaggttaggggctttataggccgttccataggaaccgataagccgatagccctcaacaaactcccaaccagcactggtttgccatgtggaatgccagccaaattgggaattatcgtcgcttcgcactgagccttccaaggtaacatcactaacttgctgctgccctgtcagataaataccggtattacgctgtgtaaaatcagaggtggtattcgaattgctactcttacgctcggttttctgctcctgccaatcagctccagcggcgatcgtgccattcgccacctggaaagtattaccccactgtaggttatattgctcagcatcgtctaaagaggcggtaatatcatgggggccaaagagtgggctgtaattataatctttggtgcggttatagctggctatcagctgagaggcataaataccgtttttatagcgtagccccgtatcataggtgcgactagacaatttacgcgtatctatcagtgctaatgggttactgaaattagcatagccgtcatagtcactgcggttatcgaaaccgtatacacgggcaaaaccattaaactgctcgttaaattgatgctctaatcctgcccacagcatttttcccataaaaccatcgcggtcaggctgacgtgggccaccagcttccggcatccccgctacaatgtcatatcctttggtgtaggtataattaccagccaaagtgattgtagtgtcttcacccaacttttgctgtgttgaaccatcgtaggtttgataaccgtgagaacccagccctgcagataaagttgtgcccgggttctcacgcgcggtaagaatgttaacaaccccgccaatcgcatcagagccatataccgcagagcgtggcccacgaatatattcaatacgttgtaccaacgaaatcggaatttggctgagatccgatgcgccagtgatcccggcctgatttaatcgaacaccgtcgatcaaaaccagcacatgccgggattcggtgccacggataaacaacgagctacgctgccccataccaccgtcttgcgcaatatcaacacccggtaaacggcgtaaaacatcattaatactggtcgcctgccagcgcacaatatcctcacgggttacgatattcattggcgctaatacgctggatattggctgagggaagcggtttgcagtgaccaccatttggtctctagtgtcagaagaggtgttggaactgtcttgcgcccagccagaaaaggctgtcacagatagagccgtgaacagcgtatattttttaattgtcatgaaaagcatccaaacttaattggcggatgccgcagaaccatggccggtagcacgcgacggccacaaatattgcgacgtaataccggcaggttttcgggcttgggatttattgcctcaacctccttattaaagtgcgaactcttaatagatgaggtaaagcaataccgggcgatgacttcccatccgctatggacagtgtctgttaataaactatcgccgtgacttccccttaccgctgcgcgtcagctctggattcacaccagattcccatttcactctcagctggaggccggacggcaatgctacgatcaacataaatagatgtctagactgctatgattgtaacgaggaataaacacgacaaaactggacttcatagtcacatcccctacaatcccgcaggaataaccatcctttttactgccagacgagacgaaacatgacccccgacatcctgcctactgaaaattacgatcaccaattggcggagaaaattgcctctctcaaagagatgatgtcgccgttcaaggcacctgaaccggaggtttttcgttctccggcagaacattaccgtatgagagccgagtttcgcgtttggcatgatgaagatgagctgtaccacatcatgtttgatcagcacaccaagcagcgtattcgcgttgaacaattccctgtcgccagcgtactgatcaaccgtctgatgagcgcgctaatgaccgctatccgcgcgcagcctattttgcgtcgcaaactgttccagattgattacctatcaacacgcagcggcaaaatcattgcttctttactgtatcaccgtcaattggacgaagaatggcaacagcacgccatggcattgcgggatcagctgcgtgctgaaggctttgatttacaattgattggtcgcgccgctaaaaccaaaatcatgttagatcatgactatgtcgatgaaattctaccggtcgctggccgcgatatgatttatcgtcaggtagaaaacagctttacccaaccaaacgccgcggtaaatattcacatgctggagtgggcgctggacgtcactcaaggtgctagcggcgatctgttagagctgtattgcggtaacggtaatttctctttggcattggcgcgaaattttgatcgggtactggctaccgagattgctaaaccttccgttgcagcggcacaatttaatattgcggctaaccatattgataacgtgcagattattcgtatgtcggcggaagagtttactcaggccatgcagggcgtacgtgagttcaatcgcctgaaaggtattgatctgaaaagctataactgcgaaaccatttttgtcgatcctccacgcagtggcctggatgacgaaaccatcaagatggtgcaagaatatccacgtattctctatatttcctgtaacccggaaacgctgcgagctaatctagaacaactacaacacactcataaaatcagtcggctggcgctattcgaccaattcccttatacccatcatatggaatgcggtgtgtggctggaaaaacgcgactaatcagacagcaaaaagggcaacatagcgttgcccttctgatttcagcctaatggattcccactcaatatttcatgccataagcgggtatttcactgtgattctgttgctgctgctttacgcgccttcagtttgaagaaaatccagaataccaatatcacacacaggatagacggcaaaaaattcgagcctatctgcggatactcgacccgaataatggcactgtaggccagaatacccagcaggaaacacgccgaagccagtttaggcagccccaacggcattgggtagttaagataacgctgatgcagacagtaaacggccagaaccaaagccagcaacgggaatagcgaaaaagaaacgaatgagctaaacaatgcggcaaaagaaccgtttactgcaagcccggcaatcaacgccaatataagggtgccattttcacggcgaggttgttccatcatcttcttccttactttacttttcttcaacacgggatacagcaagcctttcctgttcacggcgataccaataataagcgcccttggaaatcatccgtaactgcaagactaaccgctcctctaactgtcgccgttgttcaatatcaacgtccagcacttccgcaccggcactgaacacaattgtgaccatggcctcagcctgcgcttcggtgaagctgcgcggcatatgattttccaattcgagatagtcggccagttctgcaataaaatgctgaatttcgcgggctacagcggcacggaaagccgccgaggtaccggaacgctcccgtagtagcaaacggaaggcattcggattgtttccaataaactccataaaggttgagaccgaggtgcggataacgctaccgcctttggctatgcgttggcgagcctggcgcatcagttgacgcaacatcaggccactttcatccaccatagtcaggcccagttcatctacatcgcggaagtggcggtaaaatgaagtaggcgcaataccggcttcgcgggaaacttcccgcagactcaagctagcgaaactccgctccgcactcagttggctgaacgccgcttcgatcagggaacgacgcgttcgctctttttgttgtgctctgacgcccataatcgtacccaaaagatatccattttctttagctaagccatatagtaagcaatataccaaactttatagtaacaacgactatacaaacacatcatccttatccgcgtaagaacgaatttacagcaggagccaaagccaactgcctaatgatgattgggttatttataggatgatgttaatgtatcgttgtaattttgtataaaaataggtctctcctacatgcaacagcacttccattttgatgccatcgttattggctcgggccctggcggtgaaggtgccgctatgggattggtgaaacaaggggctcgcgttgccgtgattgaacggtataacaatgtgggcggtggatgtacccactggggtaccattccttccaaagccctgcgccatgccgttagccgtattattgaattcaaccagaacccactttacagcgacaactcgcgtgccatcagctcctctttctccgatattttgcgccacgccgatcgggtcattaaccagcaaacccgcatgcgacaaggtttttacgatcgtaaccattgtcagatgttttccggtgatgccagctttgtcgacgccaaaacccttaacgtacgttacgccgacggcacgtccgatcgcctgacggccgataacatcgttatcgcgaccggttcgcggccttatcgcccggagaacgttgattttacccacgagcgtatttacgacagcgacactattttgcagctcagccacgagccacagcacgtcattatttacggtgcgggagtgattggctgtgaatatgcatcgatcttccggggattgagcgtcaaagttgatttaatcaacacccgtgatcgtctgctggcatttctcgatcaggaaatgtccgatgcgctctcctatcacttctggaataacggcgtggttatccgccacaacgaagagtttgagcagattgaaggcactcctgatggcgttatcgtccacctgaagtccggcaagaaagtgaaagccgattgcctgctgtatgccaacgggcgtaccggcaacaccagcggactcggtttggaaaatatcggtctggaagcggacagtcgtggtctgctgaaggtcaatagcatgtaccaaaccgcgttgcctcatgtctatgccgtaggagatgtgattggctatccaagtctggcatccgccgcttacgatcagggccgaattgctgcgcaggccatgattcaaggggaagcgcaggttcatctgattgatgatattcctaccggaatttataccattcctgaaatcagctccgtcgggaaaactgagcaggaactgacagcgatgaaagtgccttatgaagttggccgggcgcagtttaagcatttggctcgggcgcagatcgtcggtatggatgttggtagcctgaaaattttattccatcgggaaaccaaacagattttgggtattcattgctttggcgaacgcgccgcagagattattcatatcggtcaggccattatggaacaaaaaggtgaaggtaataccctggagtatttcgtgaatactaccttcaactatccaaccatggccgaagcctatcgcgttgcggctctcaatggcttaaaccgcctgttctaacggcgcgctcatgcgaatttgcatgtgatcgcgtatcgcctcggctagttgctcatagcggccacgcaatggggagccggggcgataaaccagagcaatagtgcgcttcggctccggtttgtagcattccagatagcagacaccgtcgcgctctttttcttttggtaccgccagtgatggcaataaggtgatgccgctgcccgccgcgaccatattgcgcagagtttctaaactggtcgcgcgaaaatgggtatcttcctcagcacccgcctggaagcaaaaacccattgcctgatcgcgcaagcagtgaccatcttccagcatcaataatttttctcctgctaattcatgcatttgcacgcggtcacgcttcgcccatggatggtcggaataaaccgccagattcattggctcatcaaataacggcacttcgataaaagcttcggtctctttgaccaacgctaaaatagcgcaatccagtttaccgctgtccagctgtgccaacagattatgagtctgcgcctcgtgtagatacatctccagctttggaaaagcctgatgcagcatcggaataatttgaggtaataaatatggcccgacagtgggaatcaaaccaatatgtagcggcccggacatactctcgccctgcaaactggccatctctttgagcacttttacttcccgcaatacggttctggcctgatccaccaacagcaagccagcctgggtaaacagcaccttacggctggttcgctccagcagcatcacacccagttcatcttccaacttacgaatctggccgcttaaggtcggctggctgacatggcaggaatccgcagcacgtcggaaatgacgaaactcggccaaagccaccagatactcgagatcgcgaatgttcatctgctctccactttatgatagtcaataacgataggtaagatagcaaccagtgattagatctatcaagagataaagtaaataatgtgtctcaagaaagaaaagcctaactaaatgaaaaattatgttttctaattaaggagttacacatgtttaccagccaagaaggtaaaaaagtcccacaggttactttccatacccgtcagggcgaccagtgggttgacgtaacgactgatgacctgtttaaagataaaaccgttatcgtattttcactgccgggcgcgttcaccccgacctgttcttccagccatttaccgcgctacaacgagttatccggcgtgttcaaacagcatggcgtagacagcattctgtgcatttcggtcaacgacactttcgtaatgaacgcctggaaagccgaccaacatgccgaaaatattactttcgtgccagacggcaacggtgaattcaccaaaggcatgaacatgctggtagagaaggccgaccttggctttggcccacgctcatggcgttactccatgctggtacgcaacggcgtggtagaaaaaatgttcgttgaaccaaacaaaccgggcgatccgtttgaagtgtccgacgctgacaccatgctgaaatatttagcgccagaatacaaagtgcaggaatccgtggctattttcaccaaaccgggctgcccattctgtgctaaagcgaaacaaatgttgcaggatcgcggtatacaatatgaagaaatcgtactgggtaaagacgcaactaccgtgagtctgcgcgccgtcagcggccgttcaactgtaccgcaagtgtttatcggtggccgtcatattggtggcagcgacgatttagaaacctatctgccagcctgattacatcaataaaaaagaagccaacgtgaagtattttggtaggcctcggcctacccttttttcctgttaggagcggatatgaaaaccttaaacgtagatgtcgccgtaatcggtggcggcaccgccggtctgggcgcttatcgcgcagctaaactttccacccccagcgtggtaatgattgaaggcggcgaatacggcacaacctgtgcccgcgtaggctgtatgccttccaagttattgattgcagccgccgaagcggtgcatgaaattgaaaaggcgcccggctttgggatctatccgcagggaaaaacgctgattaatggacgcgaagtcatggatcgcgtgaaacgtgaacgtgaccgtttcgtaggcttcgtattggaaggtgtcgagagcattcctgccgtggataaaattcagggctacgctcgctttattgatgacaacaccctgcaagtggacgatcacacccgtatcgtagcgcaacgtattgttatcgcaacgggttctcgtccgagctggcctgcaccctggaacgatttgggcgatcgccttatcgtgaacgacgatgtattcagctgggatgacttacctgaatccgtcgccgtgttcggccctggcgtgattggcctcgaattaggccaagccctacaccgcttgggcgtaaaagtaaaaatgtttggcgtgggtggagccgttggcccgctaactgatagcgtagtacgcgaatacgccgccaacacgctaggcgatgagttctatctcgatcctgatgtaaaagtcgaattgattcagcgagaaggcgataaagtctttattcgctatcaaaatctggatggagaaatgcaggaaatcatggtggactacgtattggccgccaccggtcgccgtccgaacgtcgataaattagggctggaaaataccggtctggagctagatgagcgcggtgtacctaaagccgaccgattaaccatgcaaaccagcgtaccgcatatttttatcgccggcgatgccagtaatcagcttcctttattacatgaagccagcgatcaggcacgcattgccggtgcaaatgccggtagtttcccggaagtgttgcccggtttacgccgaagcccgatttccgtcgtattttccgatccgcaaatcgcaatggtaggttcgactttccgtcaattgagccagaaattcagcgtctgcggctgttttgaaatcggtgaagtttctttcgagaatcaggggcgttcacgagttatgctgcgtaataaaggcatactgcgggtttacggcgagcagggtacagggcgcttcctcggagccgaaatgataggaccaagcgctgagcatattgctcacttgctggcttgggcacatcagcagcaaatgaccatcgaccagatgctggatatgccgttctatcacccggtgattgaagagggtttacgtaccgcactgcgtgacctgcaatccaagctgaaacttggaaccgacgaggcagaacgctgcctacgttgtccgggcgagtaattcgcctctctattacctttctctcagcaaaaaccggggtcttgcccggtttttgctttctacattctttttctccgcgccgaatttaaattatttctgcgggacgcctccctgaaaagctccgccctgattgccccgctgcaaaaaattccccactgtacttttctcaccgcgaataacagagatgtacttgaaacagtattaacagtactgcattggaattggaggcgtaatgaaaggcatggaaagccggattgctcgtatcaaagcgaacccatcgggagtgaagttcagtgaactggcaaaaatttgcagttattacttaggaccacctcgacacaactcaggcaatcatcatgtctacagcatgccttggcaaggcgacccacgaattaacattcaactcggcaataacggaatgtcgaagttttatcaagtgaaacaagtaattacatctctaggaaagttagaggagatgatccatggttaatattgaacactacacctaccgcattacctggtcggcagaggacgcggaatttattggtttatgcgccgaattccccagcgtgtcatggttagcgcctaccagagtacaggcgctggatggaataacggtagtagtggcagatattctggccaaaatggttcgctccggtgaaacaccgccgataccgttatcagagaagcacttcagcgggaaattagtgctgcgtatgcctcccgaccaacatcggcgtttagccatcaatgcgacaggagaagggattagcttaaatcgttatttatgctcacgtttggcctgttagtcacagaaatcgtctcgttagagtctgctcgccaatgggcttgctgtgtgcaacaaaactaaccgactgagcttgtattcgcaaagctggaaactcgtttaggcagttggtgaatgcgtgatgagcgccgaaagtacatatttatctggcggcttcggctctctgttttatctcgaaatctaccggcagcgagataatcacctgcccaccagataacaattcagtcggcggaaaaggtaggggctgggcacgttttaaaatagctaatgcctcacgatctaataaaagagtgccgctgctactggtcaaagtagcggatagcactcgccctttgctatcaacgataaatttaacgatcgcggtgccctgccgcttttgctttctggctccgggagggtagcgcttgaagttagctaaatggctttgtaaaacgccagcccagtttgctcgtgcctgaacatgttgtaatgagtgactattattaggtgccgatacgcgctgggctgtccctgataacggcgaactcttgctcatcacagtcgacagtctttcattattttcttgatttataacggttttagatttaagcgcgttagccttttcacttggcttttttgctattttcggttttagtttcaaggcgggtaatacggaatcaagggaaggctcttctgccaaaaagttattattttcaatatgttgttctgtctgcgattcaccgacgggtaaagttggctcttgttcaacgcctacctgaattttttcaaggcttggtgcaaattctgcttccgctgacagcgttagcactacggcggacagggaatctggcggtaacggagaaacagatcgctctgccaaaaaccacagcccggtcaaatgcaacgcaaaagataacaacccgccgcaccacaaagatatcgccgaggagccacgacaaactgaagagtgagtattttccacggataaaatcatcacattcctttgttattcaattaatagcgtaactttcattaggtaagagcagccgtttactcttctgccaacgcggcatacagacgatcggccaagggtttcagtaaatagctcagtagtgaacgctctccggtgcgaataaaaatatcgacggacatacctgactggattttttctgtgtgagtttgctgtgcttcatccgtattgatcgacacagttaatggataatagggctgtaagctgcttgggttattcaatcggtcagcgcctatatgcagaacgcttccctgcaatcgaggagaatggctttggttgaaagcggaaaaaataagttctacaggtaaatctaccgcaactttatcgattaattcgatgggtagctgagcttcaatcaacagtgggcgcccgctaggaacaatttccatcagttgctgcccaaagccgataacgccccccacggtgtgctgtgccaaggcgataatgatgccgctttctggtgcataaatgcgcatattggccagatcatattccgctacgcgaatttgctgatctaaatcctgcaaccgtcgctgagttttagctaactgctcatgaatatctgcctgatattgctcaacctgctgtaataatcgttgctcattcgccttaatttgctgacaagtttcactaatatggccacggtgctgatccaccaaagccttcaatgcaatagcctggctttccatatcaagctggtgtttaagcgccacatagccgctttttgccagcgtacgcacaccttttaactgttgctgaattaaatcggactgaagttggttatttgctcgttgtctatgcaacccggcatggcgagcgcgtaaaagagctatttccgctgacaaacgcgctatttccgcttgttgagcctgatatcggtggtagaaaagttgctgttgtaaaaccatgagctcagcaatatggggcttctcacgctgcgttaataatgcgactggaaagcggatctccgcctcatgatttttctcagcaattaaacgcgcctctagcgagagtaaggaaaaatactgctgctgtagattatctcgctgactccgttccgttgtatcatccagcgaaatcagcaattgtcccttttctacccatttaccttcggcaatatgtagctgactgattcgcccgctttgcgaagactgaaccacctttctattttctgtgaccaccacaactccggcgacagcgacgcctttatctagtggcgcaaaaccggcccaaataaaaaaaccaataaaccaaatcaacaccagcagcccgccaatataaagatagcgtccgctattaatttgcagcggttcctgagcggtggcaaacggcatgatttcgcccctttccgtggcttttggattagtcaccttgtgatgttctcccggcgggaacaaaccgataattcgccacgttaccccagacattttttttatctgcttttcgcgtcgaagcgatattatctttggcgtaaaaactgctgagcactgccgcagtgcgatcaaacagctgctgttgcccgttttttagaagcaataaaaaatcactgccagacaataattcaggcttatgagtgatcataaccaccgtactaccctgccgttttagctgttcaatgctcgctaataacgccttttctccgccttcatctaggctggcattcggttcatccaacacaatcagccgcggcatcccgtacatagcccgcgccagcgcaattctctggctctgtcctccggacagtccttccccaccatcacccagctgagtgtcataaccctttggcaaatgtagaatcaaatcatgcacatccgccatctttgcagcagccacaatctgggatgaatccagcacgccaaaacgagcaatattttcagccaccgacccttggaataactgcacatcttgtggcagatagccgatgaattttcccagtaaggatttgttccaatgagaaatttctgctccatctagtcgtattgatccactgaatgctgtctgactagcaaccagtaacctcgccagcgtggatttaccgcttcctgatggccccaaaacgccaagaacctcccccggttgcagggtaaaattgacggaatgcaggataggaaccgaagtgccagctcggcaggcgagtaattgagtgacggttaactgacccagagggtcaggcaaaactatttctgtcgtcaatgaggattgctgattagccagcaaatcagttaaacgctgataagccagacgggcatggctccagtgtttccagactgcaatcaattgatcgatcggccccaatactcgcccgatcaatattgatcccgcaatcatcactccagccgtaatttctcctcgaataaccagcaatgatcctaatcccagcatcattgattgcagcgttaacttgctggacttggctaacgcactaatgcggctgcttctgtcactggcaatattttgcagataaaggaagcggcaatgctgagttagccatcgttcccgcaaagcttttagcatccccatcgccgcgatggtatcggcattacgtaaatgggcgtttgcctgcaaagttgcccgcgaagtgatttcagaggcctgttttaatggttttttacatgcccagtgattagtgcaagccagtagaatcagcacgcctgccccaatggttgccatcgctccaagccaagggtgcagcagataaatcaccaataaatagaagggaaaccagggcgcatcaaaaatggcaaacaacgcattgccggtggcgaactggcgtagcgtcgtcagatcgttaagtgcctgcgcggcctgaattttgttaccttgcaaaattgattggaaggtcgagttaaacacctgctgattcaactgcatatcggctctggtgcctaaacgaataacgacggctcctctcacccattctaataagccaatcaaagcaaaagcgcccaaaactaataaagtcagcatcagtaacgtcatggtgtttgctgaggccaagacgcgctcgtagacctgtaacatatatattgcgggagccaacatcagcaaattgataattgcggtgaatatccctattccccatagactggttttatcacagattaaaaccgctaaaatcggaggtaaggtcgtttgagaggtattagctaatggcatgggtccgtttccacactgtaatcacacttttaattcgcaccgcagctaccattccaaaagagcagtacaactcgtaaaaatgcttgaacaatgtatatcaaaatcaccaccgcaccttatttccctattggcacggcggtgacattttcattcagtcaaaggggtatttcccagcagcgctttatcaggcggctaacaacatttcgttgtactctgccacaccaattgcttcgataaatggtgcgtcatctatcacgtcgccagaattatactggctagctatagataacgtgttgaaggcgctgtcaacatccaccccactcgttttgagaatttccagcatcggatcagggtctcctttcattaaaccgtataacgttttgtgcaaatcgctctgatgattttgttcctcagtgagcgcaggatcatattgcccagtgatagccagaccactaaaggtgacctccgtttttacgatgtgtcttcccccgccgacgctaggttctagcccttcaccaaactgcacctcatcaatattgccatggagcgtatgctgaggataaaaggtgtaatgtaagttacccttcgctatcaggctggtttccgtattatgcgaactgccaatagtaaattgatggccattaaaaccatccgatcccccgtaaaattgcccacgatctttaaccggagccagttcgatattaccgaaccccgcagcccacgcttttaggtaagatgaaacactaaattcggcaaattcttcttggtatttaattgttatactcataaataatttccttttagtaaatgggatataacttagaatatgattattaatataaccatacataccaacaggggttaattaacacacctgaagactttaaaatttgtattcaaatccaccctgaatagttcggccacggctagcagaaaatgacagtgaatcgccataattaaccagataagcacgattactgatattttctattgaagtacgtaatatcaaattatttgttattttatagctggcatataaatcaaacactatgtatttcggccagtcagcgacataagccgtacctggatagccataaccattaagcactgataaatcttgatacccacggttataacggattacggtaccaaaatctaacagtttatttaatgctcttccccccaacgttaaactgccacgatcgcccggtaaataagctgatgatccgaataccgccccatgtctacagagaatgaaatcattaagatggttaccatcgacaccatacattcctatcccttttgtatttttaaccgattgaataccgcccaaccaggctggttttgagcaagtatcgttatgacctatcattcgggtataattcagactggtataaaaaaaaccggcatcgtaacttaattgatattccaatccgcgaaagcgacttttaagtaaattattaacgtaagcagcataggcaaatgattggcttccgcgcagaggtaatgctcgctctaattccaagttgatatagttcgtcacccgggtatcaaagtaggccatttttgcgccaaatttatcgccgctaatgaataaatcttcctgttgaatattcaacccagattcccaggtgcgggagcgctctatggccagattaggatttgggaacaaaaaacccgaaccgtgggcactgccggtagccagagtttctgttatacccggtggccgccatgattgaccgtagttgccaaaaaactccagccattgcactcctggcttcaccccaatgcccaaggttggcaatatttgctgctcatggcgatcaacatcccaggtcattgtcacagggacttttttacaggtatttctttttcccccgccatgttgggggttacatgggttttgccgtgtataaggcatttttgatgtgtatagccaggtatgcccttgtaatcgagaatgttcgaaacgcagcccgccatccagccgtaaccagtcatcgtagtggtaatcaaactgagtgaaaacgctagtcagactgcgctggccagacggagtcacaccctgcatgagatctttgttcgtgtggccgctggaacgatcgctaaaccaatccataccatattgaaggctcaataaatggttatccggcagcatgaaacgttgagtattttgtagctggagaccgcgcgtagttaaacgcgtgcgagtggtatatttccgacagaaaataggatcagaacacaaagtattggttttatcatcggtatcaacgtaataggcttttgccttggcatccaaccagggtagatgctcgggctgtaagctgtaatccaatccgaaattctgcgttatgacatcgctaatactgctggttttccagccgacgccgcttttattcggtgagttttttacacttaccagaaagccgccgttagggctgcttacctgagtttgcaggtaactggcaaccaaacgctgctccgcaggcaagttccagcccactttagccagtcgggtatgcatttggtagccggaattgagcactttcatgtgctttaactcatcaccgattgagtttttccccttatttccatatccaaaacgtagctcgcccagactaccgatgtttcccggccaataatcaccaaagttccgctcacttatggctatcaataaatctccggtttcatgaccaaatgccaatgttccgccacctataaatcgggtaccgttatcgcccgttgtggctcgcagattaccgccaagctcttttcctggctcaagaaaatccgccgcgtttatcgtattaaaagtagcaataccgccaattacgccggcgctaccgataccgctggtcggccctttttcaatcaccacattgctaagaatatccggatcaataaacatcacgccgttacgtccgccgtgaccacttttcataaagttttgccgcataccgtcaatattcatatttatacgaccaaaatcttgaataccgcgaatattgaccgataaagcaggatcttgttggtctacggcagaatagacgccggcagtttgctccaatatatcagccgcatggcgggcaggacggttatctaattgttctttagttatttcactaacagagcgaggttcatcatatatccaatcgtcagaatattgcagaccgccaccttctatttttagcggttctaataccacattattatcatctatctttgaagaggggatattaacatcaagctgttccgagtaacttttatcactaaataaataaaaaataaaaaaaagaatgatactgattaaaccattaggcttaattttattcacataattattatgcatatttttgcttcatccttggaaaaataatgcgacagccaacttagttatttcactaaatcaacagtttaaaaataaagtcttacattagcgctttatttatatttcaacaattgagaatgattatcataatcacttaatgaaataaactcaacttcctacaggaagaaataaagaaatagcgccaatgaatgacagtaaatgtgaatactcgccctaatgctaaaggaatgaatggttaattatcgcagatgaacccaatatattaattaaagggatgtttaattacgactgacagttagcctatagctaacatattcacagggaagggaatatttggcaataaagcggatggtaagcgtgccatccgcaatgcgtaaggaattaattaaaacaaacgctctttagcttcagcaatggctgatgccacctgcagtggcgatacgccgcccttggccacacgtttatccagacaggattgtaaagccagtattgggtacacgtcgtcgctaataatggcgctgaattttcgcaaatcctgcaacggcaacgcttccagtgctttaccctgacgaatggcttcaaccaccgcttcgccgacaatatgatgcgcttcacggaaaggcacgcctttcgctaccagataatccgccaattcggtcgcattcgcataaccctgctcggcagcttctttgcaacgcggacgtttcacctgaataccatccaataccagcgccgccatatgcaggcaatccagccaggtatccaatgcgtcaaacagcccttctttatcttcctgcatatctttgttgtaagccaaaggcaggcctttcaatgtcatcatcatcccggtcaatgcgccttgtacacggccacatttaccccgaatcagttccaacgcatccgggtttttcttctgcggcatcagggaagagcctgaagtgacgcggtcagataaatcgacaaaggccgcttcgccactgttgaagaaaatcaaatcttcggcaaaacgagagagatgaaccataccaatgctggcatttgacagtaattccagcacatggtcgcgatcggaaacactatccagactgttgcgggtcgcagaagcaaaacccagccaatcggccagctgttcgcgatcgatggcgtaagctgttcccgccagcgctccacagcccaatgggctcacgtccaaacgctttaaagtgtcttgcaaccgactttcatcacgagccagcatttcgctataagccaaacaccagtgagcaaaggtcaccggctgagcgcgttgcagatgggtataacccggcatgaccgcgtcctgattggcttccgcagtgataaccaacgcctgttgcagctggcgtaccgccgattgcagctccgtcacttggaatttgcaccatagttttaaatcggtagcgacctgatcgttacggctacgtccggtatgcagctttttacctaaatcgccgactttggcaatcagtttggtttctacccagctatgaatatcttccgcatcgctggtcagaatggcttgtggatcggcctgaacctcttccaataatacggtcaacgcctgttcgagttgtaattgctcttcggcgctcaacacgcctacggtaaccagcgcttttgaccaggcaacagagccgaaaatatcctgttctgccaatcggtaatcaaaccgcagagaatcgttaaattgcttaaaccgctgatctgctgcctgactgaaccgtccgccccacaatgccataacttgatttccttaaactgataaaccgataatcctgataaacgatgctaaaacagtgagatgcgagcgcaagcagagctgcactcgcaaaggtcaccgcattacttcttcgcgttcagcgcacgaatacgggaagacagcgagaacagacggataaagccgccggcgtggctgtgatcgtaaacttcatcttcaccgaaagtagcaaactcttcggaatacaggctgttagaagacgttttctgaattgcagtcacctgacctttatacagttttagaaccacttcaccgttaacttcctgcgccaatacttcggccgcagcctgcaaggattgacgcaatggggcgaaccaacggccatcgtaaaccacgtaggacatttccagacctaactgctcacgccatttaaagctatcgcgatccagcaccagttgctcaacgccacgcagcgcagccatcatgatggtgccccccggcgtttcgtaacagccacgggatttaatgccaaccagacggttttccacgatatcgatacggccaataccgtgtttagcgcccagcgtattcaatgcatccagacattggaacgggctcatcgctttgccattaaccgcaaccactttgcctttttcaacggcaacggtgaccagctcaggttcgtccggcgcgtcttctggcgctacggtccaaacccagcaatctttgtttgaagcattagccgggctttccaacacgccgccttcagtagagatatgccacgcattctcgtcacggctatagattttttccaaggatgccgtagtcggaatatcacgctctttcaggtaatccagcagcgcttcacgggaacgcagatcccactcacgccaaggcgcaaccactttcagttgtggcgccagcgcggtataggtgctttcgaaacgcacctgatcgttacctttaccggtcgcaccgtgggctaccgcatcagcacccagtttcaacgctagctcaacctgcgctttagcaattaacggacgcgccattgaagtgcccagcaggtaagtaccttcgtacagagcgcccgtttgcagcactggatacacgtaatctttgataaattcttcacgcaggtcagccacatagcaggctgaggcacccgttcgcagcgctttttgttcaatcccttccagatcggcacgttcctgcccgatatccgcaacgaaggcgatcacttcgcagttatcatagttttctttcagccatggaatgattgccgaagtatctaagccgccggaataagccagaacaattttgctgatgcctttagtttgcattttcatttccttgaatctcaattcagataaaacaatagaagaagaatctgtaatcaccggagcgacgaggctcaggccagaatacgtgtacctatcggtaccccgttaaacagagcaggaagctggtcagcatgacgccagctggcaatatccaccggacgccccagtgaacgggctgcatccaacgccgcgttcactttcaccaccataccatcagtaataatgccctgagcaatcagttgctctgctttttgcgccgtcatttcggcaatgcgttgccctttgccatccagaatgccgctaacatcagacaacaggattaaatccgcgcctaaggttgccgccagcgcggttgccgcctgatccgcattcacattcattagctcgccagaggcggtaatgccgatagaactaatgatcggcatgtagttagcagccagtagggtttgtactaacgtcggtgaacccggttgagcacctccaacgtgacccaactccgcatctagcggcgttactgtgaccgtattaccatcgcccaaacacaggccaacggcggcgatatgatgtttcaccgcccaggctaacagggttttattggcagtccccgccagtgcaccggtgatgatgtcgatctggtcggccggcgtcacccgcaggccatttttcttcacgacaggcagagccagttttttcatcaagtcgtctaccagacagccgccgccatgcataatgaccagcggacgctgatgcttttcgcggtagatcaccaaggcattaaacaggcgctccaacgcctcttcgctgtccaataacaccccacctaatttaatgactaacggattcatcatggtctgcgcctcaattgcgtcttgaaaatataggggtgagcgagaatacgttgcgggagaatttcgctaccgtccctgattaaagcaaagcctgagtttccgggaaaccaaagcgtatattcatgcactgaacagcctgagctgccgcgcctttcagtaagttatcttccgtcgcgaccacaatcagatgttcgccctgaaccgaaaagccgatatcgcaaaacggtaacccaaccacggctttcagtgcgggaacgccctgctgatacaaacgcaccagaggtttatcctgataggcgttgtgataggcctcggcgatatcctgtgcggtgacgccagcgtttaggcgacaggtaatggtagccagaatgccgcgggcaaaattccccagatgcggagtgaaaatgaccggcgtacccaaatgagccacaatttcaggctgatgacgatgagtaaacaagccgtaaggctgcaaactgacttcgcagaagctgttgccgacgctggctttacgccccgcgccgctcacgccgcttactgcattaatcactggccactgttcctgatttagcaaaccgttttctaccagaggctttaacgccaactgggatgccgtgggataacaacccggcacggcaatcaactgagcttgtttaattttatccgcctgccattccgccaggccgtaaactgcctgctccagccattcggcatgctgatgttcaaaaccgtaataagtggtataaaaatcagggtcctgtacgcgatacgcaccggacaaatcgaatactacgcagcccgccgctagaaattgcggagccaaatcgtggctaacttcatgagcggttgccagaaacaccacatccacgtttttcgcagcttgagccacatcaaccaagggttgcagcggtaaatcgatgatgccttttaactgcgggtgcagatcggaaagcaattttcctgcatctgcactttgcgctgaaaccgttaaaccggttatgttcatatgtgggtgacgattcaggtaagccgtaagttcagctccggcataaccgctggcaccaacaatcagcgtattcaacatggattcagttcaccttctgactaactgtacataagtacgcaaaacgagttgcagggtttatcagcaagtttttactgtttccctacgcgattgagcattgacattttcgtaaattcaagggcgtttctggttcccttacgctcatgcttgctgtattttcattcaaatagttattcacaataactgcatgaatattgatactaccctaaccaaaggctgtcaacagtgaagatgaaattacctccatttattgagctgtaccgggcgttaatcgcaacgccctctattagcgcaaccgatagcgctctggatcaaagtaatgaagcgttaatcaacttgttggccgaatggtttagcgaactaggttttcgcgtggaaatccaaccagtgccggaatcccgcaacaaattcaacctgctggccagcattggtgaaggcagcggcgggctgctgctggcgggtcataccgatacagtaccttacgatgaaggccgctggacgcgcgatccgttcactttgagcgaacatgacaacaagctgtacggtttaggtactgcggatatgaaaggcttctttgcctttattctggatgcggtgcgcgatatcgacgccagtaaactgaccaaaccgctgtatattctggctaccgcggatgaagaaacgactatggccggagcgcgttattttgcggcttccacccaactacgccccgattttgccattatcggcgagccaacctcgctgaaaccggtgcgtgcccataaaggccatatttctagcgctattcgcatcgtgggtcagtccggtcactccagcgatccggcgcgcggcgtcaacgccatagatctgatgcatgaatccatcacccatttgatggcgctacgcaacacattgcaggagcgttacaacaatccggccttcaatattccctatcccaccatgaactttggccacatctccggcggtgacgcggcaaaccgtatttgtgcctgctgtgaattacatatggatattcgcccgctaccggggctgacgttgagcgatttaagcgaattgatgaatgaagcgctggcaccggtgagccaacgctggccgggtcgcttgaccatcgacgagctacacccgccgattccgggttacgaatgcccaaccgatcacgctatggtggcggtgattgagaaactgctgggcagccgtaccgaggtggtgaattactgcaccgaagcaccgtttattcagcaggtatgccctacactggtgcttggccctggctcgattaatcaggcacatcagccagatgaatatatagacaccgcttttattgaaccgacccgcgagctgatttcccagttggtcgatcacttctgccagcagtaagcaagctacccgaacgcatgtgttatcgggtaagcacgtgttatcagataaaaaagtggatgggagatcgctacccatccacagatagcccatttcgatcaatatcgatgattagccagactgataacctgcgaccagtaattaaatttcagaaatacccccaattttgatgtttttttgctaaaaatagtgtcaattgggttattggaattgaacgcggcgagattcgtaatcagtctcagcctcttgggtgaaattaatttacaaaaagaaaccataaaaggttatacctctaattatgagggttataggcaagcggccaacaaacgcatccgatgagcttactctggtcagccattcacatgagcgagcgtaaccaacatgtctgtaacctcaaatacgcagggtatatatgggtcaggggtcatatgaacgaacaatattccgcaatgcgaagtaacgtcagtatgctcggcacactactcggagacacaattaaggaagcgctgggcgagcacatccttgaccgggtagaaaccattcgtaagttatctaaatcttcgcgagccggtaatgaagcgcaccgtcaggagctgctttcgacgctgcaaaacctttctaacgacgagttattgcccgtcgctcgtgcgtttagccagtttcttaatctgacgaacaccgctgagcaataccacagcatttcgccgcatggtgaagcggcaagtaatccagaagccttggcccagctgtttaatcgtctgaaagataagaatctaagcaataaggatatgtgcaaagcggtggatgaactgtccatcgaactagttcttactgcgcatccaaccgaaattacccgccgtactctgattcataaactggttgaagtgaatacttgcctgagccagttggatcacaatgatttagccgattacgaacgcaacaagatcatgcgtcgtttgcggcagttagttgcacaatcttggcataccgacgaaattcgcaaactgcgaccgtcacctatcgacgaggccaaatggggttttgccgttgttgaaaacagtctgtgggaaggggttccggctttcctgcgtgaattcaatgagcagttggaaaattctctcgattaccgactgccggtagaagcggtgccgattcgctttacctcgtggatgggcggcgaccgcgacggcaacccgaacgttaccgccgaagtcacccgccacgttctgctactcagccgctggaaagcgaccgatctgttcttgcgcgatattcaggtgctggtttccgaactgtcgatgtcggaatgtacaccggaactacgcaaactggccggtggcaaagaggtgctggaaccttatcgcgaattgatgaaacgaattcgtacccagctaatcaacacccaaacttatctggaaggccgcctgaaaggcgatcgcgtattacctccggaagatctgttgatcagcaatgaacaactgtgggaaccgttgtatgccagctatcaatcgctaaaagcctgtgggatggaaattatcgccaacggccagttgctggatacgctgcgccgcgtgcgctgcttcggcgtgccgctggtgcgtatcgacgttcgtcaagaaagtacccgtcacaccgatgctattgccgaactgactcgctatttgggtctgggtgattatgaaagctggtcagaatcagataaacaagcgttcctgattcgcgaacttaactccaagcgcccgctggtaccattaaagtgggagcccagcgccgagactcaggaagtgctggaaacctgccgggttatcgccgaagcgccggaaggctccatcgccgcttacgtgatttccatggcgaaagtcccttctgacgtactggccgtgcatttactgctcaaagaagccggttgtccattcactctgcccgttgcgccgctgtttgaaactctcgacgatctgaataacgccgatgacgtgatgaaacagttgctaagcattgactggtatcgcggcctgattcagggcaaacagatggttatgatcggttattccgattcagccaaagacgcgggtgtcatggccgcttcgtgggcgcagtatcgtgctcaggatgccttaattaaaacctgtgagaaagccggtgtcgctttgacgctgttccacggtcgcggcggttctatcggtcgcggtggcgcacctgctcatgcggcgctgctctcccagcctccgggtagcctgaaaggtggcctgcgcgtcaccgagcaaggcgaaatgattcgctttaaattcggtttacctgaagtcactatcagcagtctggcgctgtacgccggggcgattctggaagccaatctattgccaccgccggaaccgaagaaagagtgggtcgaagtcatggatctactgtctgaggcatcctgtgatatgtatcgcggctatattcgtgaaaatcctgactttgtgccttatttccgtgcggcaacgccggaactggaattgggcaaattgccgttgggttctcgcccggcgaaacgccgcccgaacggtggtgtggaaagtctgcgcgctattccgtggattttcgcctggacgcaaaaccgcctgatgctgcccgcttggctgggtgccggggccggtttgcaaaaagccattgatgcaggaaaacaggatgagctggcaaccatgtgccgcgattggccattcttctccactcgcatcggcatgctggaaatggtcttcgctaaagccgatctgtggctggctgaatattacgatcagcgtttggtcgacaaaaagctctggccgttaggtaagcaattgcgcgatcagctcgccgccgatattaaagtggtgttaaccatcgccaatgacgatcatttgatggccgatctaccgtggattgccgaatctatcgcgttacgcaacgtttataccgatccattgaacgtgcttcaggcggaattactgcaccgttcccgtcagcaggaacatccggatgcccgcgttgaacaggcgttgatggtgactattgctggcgtcgccgcaggtatgcgtaataccggctagtttctgatgggggagcaatcccccaaatgatgaaatcgcaaaatcgttattgtaaggacgacaaaggggctaattagccccttttgcatattgaaatctataatgtcgacaataagttaaggcctaacacccaaagtatggcaaatggcgtagctcatttctgcccgattcagggtatagaaatggaaatcctttactccttcgcggctcagaattttcaccatatccatagcgatagaagcgcccagcattttgcgcgtctcagggtcgttatccagcccttcaaatacgctggtcatccaatgaggaacgcgcacgttggtcatggtggcaaagcgctgtagctgcttaaagttggataccggcaaaattcccggcacgatttctacgtcaattcccgtcgccacacagcgatcgcgaaaacgcaggtaactttctacgtcgaagaaaaactgagtaatggcacggttagcaccggcatcaatcttacgcttaagattaatcaaatccgcctgagcgctcttagcctcaggatgtacttccggataagctgccacggaaatatcaaaatcgccgacgtctttcagcaaagcaaccagatcggttgcatacatttccggcttaccgctgccctccggcaaatcaccgcgtaacgccacaatatgacgaatgccattgcgccagtaatcctgcgcaatctcacgcagctcacccgccgaggcgtcaatgcaggtcaaatgcggtgcagcatccagaccggtacgctctttaatgtctttaataatgctgtgagtacggtcgcgctcaccggagttagccccgtaagtcactgaaacaaacttaggtttcagtgtgcttaaacggtcaatcgagctccacagggtgtcttccatctcgctggtacgcggcgggaaaaactcgaaagagacgttaatctgaccctgcaactctgccagactctgattcagcgcttcccgctggtttgcgtgaaaaaaactcataccctgtctacctcgtcacccatcgttatcgatatcgcggtttagtttctccgcatttaccattctaagcgtccatacgtttagacgtctagatagaaaatgaccgatcttatcgctggagtcaacgcttatattagtttagcccgatgattaatcttcactcagtacacgcaggaaattcatgtgtataaaaacgggcaaacatgctcgaaatgagccgcggtagacaggggaaataacagaatattgatatgaataacaggccgctagccagatagaaactctgaatagcgacctgccagaagtacgattacaacagctgagacaaacggttcaaatcggactggatagcgccggcggttacgtctcgccccgctcccggcccgcgaatcactaatgggttatcacgataccaacgactttcaatggcaaacacattatcgcatggcaataacgaggccagcggatgttcaggacgaacggcttccacgccaacccgcgctttaccattggcatcaaaacgcgcgacgtaacgtaataccagccccatttcgttggccgcctccagacgctgaatcatttgctgatttaacgcttcgccattttcgaagaattgatcgacagaacctgtctcagtacccgcaggcaccagggactcgacccgcacttgattaggttcgatgtcgtaacccgcttcgcgagccagaatcaccagtttgcgcatgacatcctgtccggaaagatcgacgcgcggatcgggttcggttaatccttgctgccacgcctgatccaccagctcggtgaaaggtactgtgccgtcaaactgtaggaacaaccaggataaagtaccggagaaaatgccgctaattgccagaatgctgtcaccgctgtcgcgcagatcccgcaccgtatggttgaccggcaaaccggcacccacggtggcgttgtacaaccaatggcgacccgttttggcgaaagcatcgcgaatctgtcgataagtattgctgctggatgcgcccgccagcttattggcgctaatcacgtggaaaccatagctggcaaagtccagatattgctccgccagcgactgactggccgtgacatccaataccaccaaatcatcgaatggatgcgcacgcatccacaggaaaagtgattcttcatcctgctctttggcttcatcatcgtagaaagccaaggtgcggctggcgtccagcccgtcgtaactcagcaagctgcggcggctatcaaccacacctgccagtacaaattcgaatccgctgcgagccgaaatgtttttttgttcgcgggcaaagagctccagccagcgagcaccaatattacctttgccgaacagcatcagcccgatacgtttttccgcccggaacagagtctggtgtaggccttgaatcaaatgttgggtcggccccagacgcagtaccgcaacgatgctgataccgtcttcggcctgccagataaactcaaccggctgatctttaagctgttgatagaaacgatggctgtgcaacggattcttgcaaacgcctgcgcctactaatgccaccagtgccaagccttcccgtagcgataatttccccggcagcgtggcatcttccaacacccgcagggcgctattgacgacttcagaggtatagcaaagctgcaataggttacgatcgggatgaatccccgtcgctaacggtttgatttgtgagcgtttcagcagcaggtctatctctttttgcgccagcgagaaatcgtggtgacgggctatctgcaattcaatcaggcagacatcatcatgactggtcactatttttgcaccggtgcctgatgccagcacgcgttcgatgcgagtagagccttgctccggctggtagctacagcgcagctgcaaatcgatatcactgccagaaaccggctgcaaagtacgcgtatgcaataccggcgcagccagacgcgccagctcgctagcttcatccaaacgcagcaacggcaacaaacaggcatctttaactttgcgcggatcggcgctatatacgccagcgacgtcactccagatggttacccgctcggcggcggccaatgccccaacctgagttgccgaatagtcactgccattacgaccaagcagtacggtttcacctgcatcgttacgcgagataaaaccggtgaccactaaacgttgatgaggatgttgcgccaatagctgttgcagcagcggataagatcgcccttcgtcgatctgtggctgtgctgcccgctctgcccgcaggaagctgcgcgcatccagccaggtggcatccatatcctgcttttgcagtaccgccgccatcaggcgcgctgaccagatttctccatggccaaccacttcggcataaatagcatcgtcaacgcggttatccaataatccagccagacgctccagatcctgaataaaggctgcaatcaacggctcggcggcctccggtggcaataatccattaatcaaatcctgctgatagcggcgcagcgcttgctgcacctgatgcgcagacaaacgatcgctttggcttagttttagccagtttatcaattggttggtcgtactgcctgcggcagataccaccattaaatcacccggtttactgtagttggccataatttcggccactcgcaggtaacacttcacgtcagcaaggctgctaccaccaaatttatgcagttgacgcccagtgaccgcccctgctatcgctattgcattcatgcttacctcgttaccgccaaccggaaggcattttccagatcggcaatcaaatcttcgctgtcttcaatacccacggaaatgcgtaacaagctgtcggtgatacccgcagcagtccttgcttccgccgccatacccgcgtgagtcatggtagcggcatgggaaatcaggctttccacgccgcctaatgactctgccaatgtgaataattccaaagcagaaaggaagcggcgcagcacctgttcatctccatccagttcaaaactgagcatcgcaccgaagccagactgttggcgacaggcaatttcgtggccgggatgttgtggcagagaaggatgatacagcttttttactaaaggctgctgttgtaaataaccaacaatgtcatccgcgttgcgctgctgttgagccattcgcggtgaaagcgttcgcaggccacgtaataacaaatagctgtcgaaagccgcgccggtcacgccaatattattcgcccaccacgccagctctaccgccagcgctgggtctttggcaatcaccgcgccggcaaccacgtccgagtgaccgttgagatatttggtgcaggaatggatcaccaaatcggcacccagcgccagcggttgctgcaataccgggctgaggaaggtattatccaccacggtcagcgcgcccacggcctgcgccgcctggcagatggctgcaatatctaccacccgcaataatgggttgcttggggtctcaatcagtaccagcttgggtttttccgccagcgcacgttttaacgccgcttcatccccttgatcgacaaacagcacccgataggcaccgcgcttactcagactatcaaacagacgatagctaccgccgtagcagtcatggggcgcaaccagtaaatcacccggctgcaatagcgtagtgcaaaccaaatgaatcgcagacataccggagctggtcattaccgctcccgcaccgccttccagctcagccagagcacgttgtaccacgtcgcgcgtcgggttgccgcgtcgggaataatcgtgcgttctgggctgattaaaatcgataaagttataggtactggagaggtgaatcggcggaacaacacagccatattgctcgtcatcattcaacccgctacggactgctattgttgcctgtttacgtgtcatattggtttctgcctgccgggacgctaaaaatgttacgtcagattagacgcacaaagaatggacgtcaatacatctggacatctaaacttctttgcgtatagattgagcaatggaataatacccgctaaaattatagcggctttaagtatcattatgatgtcacgctgatttcagctatgccccgtgcaacaatcagggtattaagcaacaggttgagtctattaatcacgggcaaattgcgtcctttcagtgactctggtcgagtaaaaccgacatttatttagtgagaacacggaagatcgggcataattggccggttttcagaattttgtatttttccgacaaatttaaggtgtcccatggctgagtggaacggcgagtatgtcagcccttacgctgaacacggcaagaagagcgaacaagtcaaaaaaattacggtatccattcctctgaaggtattaaaaatcctcaccgatgagcggacccgacgccaggtgaataacctgcgccatgcgaccaacagtgaattactgtgcgaagcatttctgcatgcctttaccgggcagccgttgccgaatgatgaagatctgcgtaaagaacgcagtgatgaaattcctgaagcagcgaagattattatgcgtgagctgggtgttgatcccgacacttgggaatattgatttcgcagtaatacccaaaacagcgggtaacatgctatcgagacaatctatcgacctatcgactcgacgaagtcgccttctgtccacagtaggcggctttatcctacgtcaggacatgatttatatggaatgactgattggcagacctgaatcctgcgatatacacagtatttaggcagattgatgatgattgagaagcagaaatgaaaaaaggcgctaaaagcgcctttttcgtctgacgggcagagattacttcttggcacccggcacgctgaaacgcttgttgaagcggtcaacacggccaccggtagcaacgtcacgctgcttgccagtgtagaacggatggcattcaccacacacgtccagattcaggtcatgaccaacagtagagttgatcttgattacgttaccgcaagaacaagatgcagtaaccaattcgtatttagggtggatacctttttgcatgggaaacctctaatttaggccgtgtcgctatccagccctgttccgccagacaccacacgtagttaataataggatttgatatcggattatatcaaaggcggcgaatcatacagaatttgagcagccctcgcaatcgaatccgcacattgtgaatcacacagtgtaaactgttcaatctttttttatccaggatggtgtcatgtccgttgttcaagttgcattgccggtaccgcttgcacgctcattcgactaccgcttaggcagtaatatgagcagcccggcgatcggcgggcgcgttagcgtcaccttcggcaaacgcaaagctatcggaatcgtggtgggtcttagcgaaaccagcgatttccctcttgagcagctcaaacctattgaagaagttctggatcaggaaagtttattcccaccaagcctgtggcgtattttgcgctgggctgcggattattatcactatcccattggagaagtgctgtttcacgccctgccaatattgctacgacaggggaaaccggctcaatccgcaccgctttggcaatggtttgcaaccgaacaaggccgggctacgccgccggaaagcctgaagcgcgcccctaagcaacagcaggctctggccgcgctactacaaaaacctgtttatcgtcatcaggttaatgaactcgccctgacagaaagcgccttgcaggcgttacgctccaaaggattaatcgacctccgggcgcaggaaccggcaaccaccgactggcgtactcatttcgaagtgctgggcgaccggctgcgcctcaataccgagcaggccaccgccgtgggtgcgattcgcagcgaagatactcagtttgccgcctggctgctggctggcgtcaccggttcaggtaaaaccgaagtttacctgagcgtactggaaaatattctggcgcaagggcgtcaagcattgattctggtgccagagattggcctgacgccgcaaaccatcgccagattccgcgaacgctttaatgcaccggtggaagtcctgcattccggcttgaacgatagcgaacgtttatcggtttggctgcgggcgcgtaacggcgaagcggccatcgttatcggcacgcgttctgcgctgtttacgccgttttctcgccttggcgtcattattatcgatgaagagcacgacagttcctataagcaacaggacggctggcgctatcatgcgcgggatttagccgtgtttcgcgctcgcgaagaaaatattcccattgtgatggggtctgccacgcccgcgctagaaaccctgcataacgtgcaactgggtaagtatcgtcagttaaccctgactaagcgtgccgggaatgccaaaccggcggcgcagcatttactggatttaaagggtctgccgctcaaagtgggcctatcccagccgttattacagcgcatgaaagatcatcttaaagctgataatcaggtaattctgtttcttaaccgccgcggttatgctccagcgttgctgtgccacgaatgcggttggatcgccgaatgccagcgttgcgatcactattacactttgcatcagaatcagcgccagctgcggtgtcaccattgtgacagccagcgtccggtgcctcatcagtgccctcactgcggctctacccatatggtttccgttggcgtaggaaccgaacagttggaaaatgagttggcaccgctgttcccagatgtaccgatcacccgaatcgaccgcgataccactagccgtaaaggctcattggaacaggctttggccgaggtacatcagggtggcgcgcgcattctgatcggtacgcaaatgctggctaagggtcaccattttcccgatgtcacactggtggcattacttgatgtggacggcgcgctgttctccgccgatttccgctcagccgaacgttttgctcaactgtatacgcaggtttctggccgagccggacgagcaggcaaaaaaggcgaagtgatcctgcaaacccatcatccggagcaccccttgctgcaaaccctgctgcaacgcggctacgatgattttgccaaacaggctctggcagagcgccaaagcgtttttctgccgccttacaccagccatattattgtacgcagcgaagatcacgataatcgacagtcagcgctattcctgcaacagctacgcaatctgctggaagccagtccgatgaaagatgatgctctgtggatcatggggccagtaccggcgctacaggccaaacgcggtgggcgtttccgctggcaactcctgctccagcatccatcccgtcagtttctacaaaaattgataaaaagcagccaaccgctaatcaacactttgcctcaggcaaggaaagttaagtggactttagacgtcgatcccatagacagttagtctttagcttgttaattaatagatacaggtagggttacaaggcaaacgtttacggtgtgatctgcgaggcatatcgaaaaaaactacttatgtcacatttttcatgcaaattaggtaacaaattgacctcactatctgtatagaatgacgtaaggcattaattttaccgagaccactcggcttggaacgaacatcacctcgccgatcgggaatcccattcgcgtgcgataaaacattaatattccgtgctattggtaacaaactatctcaaagcgttggtgctggctcggagccagagcaaggagaaaggcgttggaacataagaaagaattcagtatggcgaccatgaaagacgttgctgaaatggccggtgtttcaaccgcgacggtttctcgggcattaatgaatccggaaaaagtctcgaccatgacgcgacaaaaagtagagcaagccgtcctcgccgtgggttattccccccatgccttatcccgaaatatcaaacgcaacgagtcgcgtactattctggtcattgtgccggacatcagcgatcccttttttgccgacattgttcagggtattgagcaaaccgccgcccaacaaggctatttggtgttaattggcgactgcgcgcagcaaacccagcaggaacgcactttcgtcaatttgattattaccaaacagattgatgggatgctgttactcggttccaacctgccgtttgatgccagtaaagaagaacaacgcaaccttccaccgatggtgatggctaacgaattcgcgccagagctggagctgccgacggttcatatcgataacttaaccgccgcttttgaagccgtacattatctgcatcagttgggtcatacgcgcattgccaccatcgccgggccagagacaatgccgctgagccattatcgcttacagggttacgtacaagcgctgcgccgtaatgggattgccattgagcaaacttatattttgcggggcaatttcagctatgaagccggtgcagaagcctttgccgaactgatgtcactgccgaaaccgccaacggcgattttctgccacaacgacgtcatggcgatcggcgctatctggcaagcgaagaagatggggattcgtattcccgaagatgtatcactggttggttttgacgatctcaaactgtcgcaatactgcgatccgccattgaccacggtagcgcaacctcgctaccaaattggtcagcaagccatgttactattactggaacagctacaagggaataacgttcaaagcggttctcgactgttagatagcgaattaatcattcgaaacagtacctgtaagcctaaaagctaggcaaatattatagggttaagtaacatgactgacttactccaacatcaaaacgcagcgaaacgatagtggcacaaagagattatgtaagccgagggcgctcaggagcgcggcgcaagagcaccagcaagaagaaaagcagtgctccaagaatatcgaaaaccctggtggcgctagccggcgccttgttggtggtattcgttggtggcctctatttcattactcataacaaaccgggtgaactcccgctgttacccagccatgatccgcgcacgggcaatggattaccgcctaagccggaagaacgctggcggtatatcaaagaactagaaaatcgtcagattggtgtaacgacgccaaccgaaccttctgctggcggcggcatcgatgcaaaaacccagttaaccaacgaacagcgccaattattagaacaaatgcaggccgatatgcggcaacaaccgacacaactgtcggaagtgccttataacgatgccactcaggttcctcgttctcaggtaacaatcaagccgccagtgaatgttcagccacagattcagcaaccggttagccaaccgcgccaaaccgcgccggtaacagcgccatcagcgcagcagcggatgttgccgtctaatccggctccggttactccggcggtaacgccaccgaagccggaaaaagagaaggaaaaagaaaaaacccagcgctggatgttgcagtgtggttccttcaaagcaatggatcaggccgaatcagtgcgcgcgcagctggcatttgaaggtattgagagccggattactaccggtggcggttggaatcgcgtggttctggggccttatagcacccgccctgcggcagataaaatgcagcaacgattgaaaggcgcaggtgtatccagctgtattcccctctctattgggggttgaaaagtatcaatccccccccatttataatctcaatatgcctcgcgttgtgttgaacgatacaacgcgggggctcattccgtctgcaacgagggttcgctcgtgacaacaattgtaagtgtacgccgaaatggccatgtagtaattggtggtgatggtcaggtcactctgggcaataccgtgatgaaagggaacgctaaaaaagttcgccgcctatataacaataaggtcattgccggttttgcaggtggcaccgctgacgctttcactttatttgaactctttgagcgcaaactggaaatgcatcagggtcatttgaccaaggccgccgttgagttagccaaagactggcgaaccgaccgcatgctgcgcaaactcgaagcgctgctggcagtcgcggatgaaaccgcttcgcttatcatcaccggtaacggtgacgtcgtgcagccagaagatgatttgatcgctatcggctccggtgggccatacgctcaatccgccgcgcgcgcgctgctggaaaacacagaattaggtgctcgggatatcgttgagaaatcactgagtattgcgggggatatttgtatctataccaaccgcttccaaactattgaagaattaacttacaaggcgtaaggatagaatatatgtctgagatgaccccacgcgaaatcgtcagtgagcttgatagctacatcattggccaggacaaagctaagcgcgcagtggcgatcgccctgcgtaaccgctggcgtcgtatgcagcttaacgaagagctgcgccatgaagtgaccccgaaaaacattctgatgatcggcccaaccggcgtcggtaaaaccgaaattgcccgccgtcttgcaaaactggcgaacgcgccgtttatcaaagttgaagccactaaattcaccgaagttggctatgttggtaaagaagtggactctattatccgcgatctgaccgacgccgccgtgaaaatggtccgtcatcagtccattgaaaaaaaccgttaccgcgctgaagaactggcggaagaacgtattctggatgtgctgattccaccggctaaaaacaactggggccaggttgacgaatctcaggagccttccgctacccgtcaggcattccgcaaaaaactgcgtgaaggccagttggacgataaagaaatcgaaatcgatctggctgccgcaccgatgggcgttgaaatcatggcacctcctggtatggaagaaatgaccaaccagttgcaatccatgttccagaacattgctggtcagaaacaaaaaccgcgtaaaatcaaaatcaaagaagcattcaagctgttgattgaagaagaagcggccaaactggttaatccggaagagctgaaacagcaggctatcgatgccgttgaacagcacggtatcgtgttcgtggacgagatcgataaaatctgtaagcgcggcgaaacctccggcccggatgtctcccgcgaaggtgtgcagcgcgacctgttgccgctggttgaaggctgtaccgtttcgaccaagcacggcatggtgaaaaccgatcacattctgttcatcgcttcaggcgctttccaggttgccagcccgtcggatttgattcctgagcttcagggtcgtctgccaatccgcgtagagctacaggcactgaccaccgaagattttgaacgcattctgaccgagcctagcgcttccttgaccgagcaatacaaagcgctgatggcaaccgaaggcgttaccatcgattttactgcagaaggtattcgtcgcatcgcagaagccgcatggcaggttaatgagcgtaccgaaaatatcggtgcccgccgtctgcataccgttctggaacgtttgatggaagatatttccttcgatgccagcgaaagtaacggttcatccgtgactattgatgctgaatacgttgggaatcatctggatgagctcgtagcagatgaagatctgagtcgatttattctataatttggttctattagcgtccgctggatagataaaagtgggaggcttggcctcccctttttgtctctggctgacatggactcacacagaccgaagcgaattatgagctcatcaacttctaccagccaagctcaagcctggctagaaagcctgcggccacggactttaccactggcttttgcctctattgttaccggctccgccctggcttattggctcgacagttttaaacctgcggtagcgctactggccttgattactgccggtatgctgcaaattttatctaatctggccaatgactacggcgacgcggtgaaaggtagtgataccgaagaacgcatcgggccactgcgcggaatgcaaaaaggcatcataacccgcgagcagatgaagaaagcgctgattctcaccgttattctcaccattatttccggcgtagcgctgattgccgttgcctgtgaaaaaccgagcgatattctgggctttctggtactcggcttgatggcgattgtcgccgccatcacctacaccattggtagtaaaccttacggttatatgggtttgggggacatttcggtactaatgttcttcggctggctaagcgtggccggtacctattatctgcaatcgggccattttgacagtctggtgatgctaccggctaccgcctgcggtttattggccactgcggtgttaaacattaataatctgcgcgatatcgaaagcgatgcggccaacggcaaaaataccctcgccgtgcgtttgggcccacagcgcgcccgttattatcacgccgtattaatcaccgccgcgattgcctgtctggcgttgtttagcctgctttatctgcaccgctggaccggctggatctttgttctggctattccgctactggtaaaacacgcgatttatgtactgcgcgagccaaccgccgcaggcatgcgtccgatgctggaacatatggtaaaagctgcgctgctcaccaatatcctgtttgccgttggtctggtatttaactaacgcgcctttttctgccaattcccagaaaaccctgcggattggcagaatttaacaattgatgattttgccaacagtagccagaaagggatatactgactatcccagccgcaaccagacattaatcctatgaaatatgatacttccgaactctgtgacatctatcatgaagagataaatgtggtagaacctctgttctccaattttggcggacgtacttcatttggtggccaaatcacgaccgtaaaatgcttcgaagacaacgggttactctttgacctacttgaggagaacgggcgtggacgcgtgctggtcgttgacggaggtggttcagtgcgccgagcgctggtcaacgcagaattggctagcttggcggccgcgaatgaatgggaaggcattgtggtttacggtgccgtccgtcaggtagacgatctggccgaactggacattggcattcaggctatggctgctattccggtaggtgctgctagcgaaggcatcggcgaaagcgatattcgcgtgaacttcggcggcgtaactttcttctccggcgatcatctgtatgctgataatacagggattattctgtcggaagatccgctggatatcgaataacaccgactcggttataccaaacgaattctataagaaagggcgatataaatatcgcccttttgcttttgcgcttaatcggttgccagcgctatggatgccgagaataacctcagacctcttccattttacccagcagtgcgcgcagacgatcctgccatacgtgctgttcttgctttagctgctcattttcacgcactaacgcttcacggttacccgctgcgtcctgaacctcttgggacagggtgttgtttttttctttcagctcttcaatttccatctgcaacaaagtgatggtatcaatcgcctgctgaactttaccttccagtttctcaaatacttcaaatgacattctttagtcccctcatgatcgcaaggcgtacatctattggtagcggtcgcattttgaagatgcaaccactgcgaatatccatcgcgctatatattcatcgaactcggtaacaagcgctgtattttaacgcgcccccgtaaacagcggcgcagcttgattaaaacgattgtatgtagcctgtctccccctgtctagcgacataccggcacaaagcacagtctctcgcaatttacctagcgccactatcagcaaatgctgaaaacctgcggcctgttatcgcgtcatattttacatatttacaacaatggaaagtaaaagcactggtctgatcacactttcagaaagcactaacacccacgcgttacgcgaattcgctcatttttatgacaaggcacacagatttcgatttcgctatttctcgtttgtgctcgttaacgataaattcacataaaccccaaggatgaatttggggaaaaaacaataaataccctataactctctgtctgtaggacatcactatgagccaaacatcaagtccgaccctaaaaggccagtgcattgcggaatttcttggcaccgctttgctgatattttttggcgttggctgtgttgccgcattaaaattagccggtgcaagtttcggccaatgggaaatcagtattatctggggtctaggcgtcgccatggccatttatctaacggcagccatttcaggggcgcaccttaaccccgccgtcactatcgctctgtggctgtttgcctgttttgatcgcaaaaaagtccttccttatattgtggctcaggttgttggcgcattctgcggcgcggctctggtctacggcctgtactacggcctgtttgttgatttcgaacaaacccaccaagtggtacgcggcggtagcgaaagcctgaatctggcaggaattttctctacttacccaaatgcccacatcaccgttttccaagctttcctggttgaaaccgtgattaccgccattctgatgtgcctgattctggcgttgaccgacgacggtaacggcattccacgcggcccgctggctcccctgctgattggtatcctgattgcggttattggtgcttcgatggggccattgactggctttgcgttgaacccggctcgtgatttcggccctaaggtatttgcttatctggctggctggggcgatatcgccttcacgggcgggcgtgatattccttacttcctggtaccgattttcggacctatagtaggcgcattattaggtgcattcggctaccgcgcactgattggccgccatttgccatgtgacgtctgcgttgtggaagaagatgcttccaccagcaccaccgaacgtaaagcgtaatccagacactggaataaacggtaactaaagcaggcttattattatgacaacagaaaataatactgaaaaaaaatacatcgttgctctcgaccaaggcaccaccagctcccgcgccgttgtgctggatcatgacgccaacatcgtgagcgtttcccaacgggaatttacccaaatttatccaaaagccggctgggttgaacacgacccaatggaaatctgggctacgcaaagctcaactctggtagaagtgctggcaaaagccgatattcgctccgatcaaatcgccggtatcggtatcaccaaccagcgtgaaaccaccatcgtatgggaaaaagaaaccggtaagccaatttataacgccattgtctggcagtgtcgtcgcaccgcagaaatctgcgaaaaactgaaaaaagacgggctggaagagtatatccgccacaataccggcctggtggttgatccctatttctccggcactaaggtgaaatggattctggatcacgtggaaggcgctcgtgaacgcgccaaacgcggcgaactattattcggtaccgtggacacatggttagtgtggaagatgacccaaggacgggtacacgtcacggatttcaccaacgcatctcgtaccatgatgttcaacattcatcagttggattgggatgagcgcatgctggaagtgctggatattccgcgcgccatgctgccaaaagtgcgttcttcttctgagatttatgggcaaaccaacatcggtggtaaaggcggtactcgtattccaatcgccggtatcgcgggtgatcagcaggccgcgctgtatggccagctgtgcgttcaacctggtatggcgaagaatacctatggtaccggctgcttcttgctgatgaacaccggcaaagaggcggtacgctccaatcacggcctgttaaccactatcgcctgcggcccacgcggcgaagtgaactatgcgttagaaggggcggtgtttatcggcggggcttccattcaatggctgcgtgacgaattgaaactgatcagcgatgccgccgattccgaatacttcgccaccaaagtgaaagacagcaacggcgtttacgtcgtgccagccttcactggactgggcgcgccttactgggatccgtatgcccgtggcgcaatcttcggtctgactcgcggcgcgaacagcaaccacattattcgcgcaacgctggaatccatcgcttatcaaactcgcgacgtgctggatgcgatgcaggccgatgccaatacacgcctacaatccctgcgcgtagacggcggtgcggtagccaataacttcctgatgcagttccaggcagatattctgggcactcgcgttgaacgtcctgccgtacgtgaaagcaccgcattgggtgccgctttcctcgctggtttagccatcggtttctggaacgatctggacgaagttaagagcaaagcaaccattgagcgggaattccgcccaagcatcgaaacgacggaacgtaactaccgttacagcggttggaaaaaagccgtggcccgtgctcaagcctgggaagaacacgactaatattgtcaactttcgcatcgcagcagccagagctgtaatttgaaagagtacatgcatgacccatcacgcgctgtcgctccccccggcagcgcgttttttatcccttcgcccctgccgccacgccccagtgtgatagaattcccgctctatatccgttttcccattctgcaattaacaggtcgagccatgaaacgtgaattagccatcgaattctcccgcgtaaccgaagccgccgccttggcgggctacaaatggttaggtcggggtgacaaaaatgccgccgacggcgctgccgtacgagctatgcgcattatgctcaacaaggtcaatatcgatggccggatcgtgatcggcgaaggggaaattgatgaagccccgatgctgtttatcggcgaaaatgtcgggactggcgaaggagatacggtagatatcgccgttgaccctattgaaggcacccgcatgaccgcaatgggccaatctaacgctctggctgttttggcggttggtgataagggcaccttcctacatgcgcctgatatgtatatggaaaaactggtggtcggcccgggagccaaaggcgcaattgatctcaatttaccgttggctgataacctgaaaaatatcgcccataaactcaataaaccgttatcagaactgacggttattacgctggctaagccacgccacgacggtgtgattgcccaaatgcagcaaatgggcgtcaaagtgtttgccattcctgacggtgacgtcgcggcctctatcctaacctgtatgccggaaagcgaagtggatgtgatgtactgcgtcggcggcgcgccggaaggggttatttccgcagcggtcattcgcgcactggacggcgatatgcaagggcgtttgttgccgcgtcatgaagtcaaaggggacaacgaagaaaaccgtcgtttaggagagcaagagctggagcgctgtctgagcatgcgcatcgaggcgggtaaagtactgcgtctggacgatattgctcgtaacgataacgtgatcttctcagcgaccggtattaccaaaggggatttgctggaaggtatttatcgtaaagggaatatggccaccacggaaaccctgttgattcgcggtaaatcccgcaccatacgccgcattcgctctactcacttcctcgatcgtaaagacgaagccttgcacgaatatctgctgtaattcatccgactaagcaaaaaaatgataagggcaccgaatcacaagtgcccttaacgtcactaaaccatatgttcctggcgctgcatccgatgagatagcggccaccagcacagcaaaatcaacaacgccatagcaaacatcagcaacccaagactaaactgcccggtctgcggtaacatcgccgatagccaggttgtcaggccggagccgatattctgcaagcctcccaccaaagcacctgcggcacccgccaggtatgggaaaggttccatcgccccggtcgttgccagcgggaataacatacccgcgccaaagaagaacaaagcggcaggaatgatcagcgtccagatattcatgatgccaaaccaaccgggaatccacatcatcagccccgccagcaggcagctaatcactgagtgccacattaaattatggaaagttcgcccttcccgccccgcataccaagccccgaaaaatgccgccggtattggcaggataaatagaatactgaccgtcaggccgctgagacccaatacgccgcccattaatacgccggagctggcttcaaacaccgcaatcccagccagagcgccaatcagcatcaccagataacagctaaaagaacgatcagataacaaggtatagaaactggccagcatgcgcggtttctccgctcgttcagggcgcgtttctggcagccagcggaacatgcaaaaagccacgccgctgcacaataagagtaaaaaagcgtagcaggcgcgccagccaaaccagcttgccaacacgccaccaataatgggtgccaatagcgggctgaccaaaatccccatattcaacatactgttggcataacgtagcgaagtaccggcgtataaatcacgcggcatggtacgcgccatcacacctgcgacaccggtgcccatgccttgcaaagcgctggccgccaccaacatcggtaaattattagagaacaaagcgcctaacgcaccgagcataaatatcgtcatccccgccagaataactggacggcgaccaatgcggtcagataaaggcccgtaaatcaactgcgaagcaccataggtcaacagatatgcagccataacccgctgtacggctccggggcgtacggcaagatcctgagcgatttcagcaatcaccgggacataaatggtctgggccatctggccgacagcaaccagaatgattaacatcagcagcaggtgaaaattctctatttttctcatggtcttaagtaatatctcaatgcagattacatgctttttcctgcgaaaatttcgggcaaatcgcagtacacctttagttatggcgcataagctatcaaattcataacttatatccagctagagtaagattttggcaaatagtactttggcagtaaaaacgaccgcaacgtaaattaatctgtacatcatcaactggattttaataaaaatacccacactttatgctgataacatttaatcgataatggtttcgagccaaatcccataaaatgcctccatcgctatttacatcatgagcacatctgaataacgggagttgtaagcatggctgaatgggtcagtggtaaaatcacgcacgttgaacattggacgaacgccttgttcagcattcaggttgacgcgccaatagatacctttactgccggtcagtacgccaaactggcactggatgtccacggtgaacgggtacagcgagcctattcctacgttaatgctcccagtgataacaagcttgaattctatttggtcaacgttccggaagggaaactcagccctcgcctacgtcagcttcgggtcaacgatgaaattatggtgaccaaacaagccgcaggtttcttcgttctggaagaaatccctgactgcaacaccctgtggatgttagcgacgggtaccgccattggcccttatctgtcgattttgcaggaaggtcgcgatttggaacgtttcaacaatctggtactggttcacgccgcacgctttgctcaggatctcagttacctgccgctaatgcagcaactggagcaacgctacaatggcaaactgagaattcaaaccgtggtcagtcgtgaagagtcccccggttctctgaccggacgcgtacctgcgctgattgaacatggcctgctggaagcggcggtaggtttgaagattgatagcgaacgcgatcacatcatgctgtgcggcaacccgcagatggtccgcgatacgcaacagacgttgaaagatcagcgtcaaatgaaaaaacacctgcgtcgcaaacccggccatatcaccagcgaacattactggtaactcgaatcagccgttaaatttggtcgaaaaaaagggcgctaagcgccctttttcatctaaatagcccgttattgttttttctcaggcaaaaacttcaccggatctggttccgggccaaaacgattatcgccttcgtgacccagaaatgcgccgcaatcaatcagcatcatgacaataatcagcgtgggaatgaaacgcccaacgccccactgccagatcggcgccaacatttgccagtttccagccatcagcatccaggccagcaccaccaacagcgcccaccaaccgactttattgcgatcgtgcaggcgttttaccacaactgccgccgttggccacagcagaaaaacaatcgcaaaggcggcggtttgcatcggcaatatctcttgcccggcaagcgtaaaaatagtcgccatggccagtagccacaggccgatccaaatccaaaaatcacgacggccaatccggcctttaaacgaaaaacaccattgctgaatggtcatagagattcgattccatttcttcgaaattattgcgccaaagtgtaccctaacgccgagcttaacgaataatctttgcgaggatttttgacaacggctaccgaataccgttttaatcttccacacactcccttaactacggcgtaagtcatgagaaataccatagccgctgtgctcgccattttagtgctaatggccacggttagccgcacagctcatgctgacccaacggataatagcggcgctccggtgccgaacaaccaacccactgcgccctatctgctatcaggggcaccgacttttgatttaaccctggtaaaatttcgcgaaagctacaaccaggccaatccatcattacctattaatgaatttcgggccattagcgctaaagatgagggcagcaatctgacccgtgctgccagcaagattaatgaaaatctttatgcctcaacggcgctggaaaaaggcaccggtaaaataaaaactctgcaaattacttatttaccgattaaaggtgatgaagagaaagctgcaaggctggtcgctatcagctatatggcagcgttgatgcgtcagtttgaacccaccttatcgctacagcaaagtctggataacgtactcaaactgctagcgcagggaaaaggctcccatttccatagccatgctgtcggtgcgatccgctatgtagtggcagataacggcgaaaaagggctaactttcgctattgaaccgattaagctggcactatccgagccataatctcggcgtaattaatgacaaaaagcaaagccattgccattaatcatctctatactgttgggcaggtaaactgccggtccggcagtcattattattgaccctcgcgtccctggttggaggaagaaacatgcgtcatccattagttatgggtaactggaaactgaacggtagtactcacatggttaacgagctgatcgctggcctgcgtaaagaactgagcaatgttgacggctgtggcgttgccattgctccaccagcaatctatctgagccaggctaaacaccatctttccggtagccgtattgctctgggcgctcagaacgtcgatgttaatctttccggcgcatttaccggcgaaacttcagcagaaatgctgaaagatatcggtgctaaatacatcattatcggtcactccgagcgtcgtacttatcaccacgaaagtgatgagttcatcgccaaaaaattcggcgtactgaaagacgctggcctgatcccagtactgtgcatcggtgaatctgacgcagagaacgaagcgggtcaaactgaagccgtttgcgctaagcaactggacgcagtgctgaacactttgggtgcaaaagcattcgaaggcgcggttatcgcttacgaaccaatctgggccatcggtaccggcaaatcagccaccccagcgcaggcgcaggctgttcacaaattcattcgtgaccatatcgccaaacaagatgctgcagtagctgaacaagttattattcagtacggcggttctgttaacgataaaaacgctgcagaactgttcgctcagccggacatcgacggcgcattggttggcggcgcatctctgaaagctgacgctttcgcagttatcgttaaagccgcagctaaagcgaaaaaagcataattcacgtttaaatacgtaaaaatgcaaaaaccccggtaacggggtttttttatgtctgaatctcaatgccgtttagcgcttattgatctcgtcaaatacgccgccggtagcaaaatgcacctgttgggctttggtccacccgccgaaaacctcatctatggtaaataatttcaatgttgggaattcgctggaaaatttggccgctactgtcgcatcacgcggacgatagaagtttttcgccgcaatggtctggccttctggcgaatacagatacttcaggtaagcatcggcgacttcacgggttccacgtttatcgacgactttgtccactaccgaaaccgtcggctcagccagaatggaaacgctcggcgtcacaatatcaaactggtctttgcccaattcattcaccgccaatagggcttcattctcccaggcaatcaatacgtcgccaataccgcgctcaacgaaggtatttgtcgcgccacgcgcaccggagtccagcacttcaacatttttatacagcgttttgacgaattcctgcgccttcgcctgatcgttattgttgtgctccagagcgtagccccaggccgccagatagttccagcgagcgccaccggaagttttcggattcggcgtaatcacggaaatccccggttttaccaaatctgaccaatcgtgaatttgcttgggattacctttacgcaccagaaaaacgatggttgaagtataaggagcagaattatccggcaggcgcttaatccagttcttatcaatccgaccacgttcagcgattgcgtccacatcgtaggccaaagctagcgtcacgacatcggcttcaataccattgataactgaggttgcctgcttaccagagccgccgtgcgactgacgtaccgtgactttatccccagtttgctgctgccagtgtttactgaaagcctgattatattcctgatagaattcccgcgttgggtcgtaagaaacattcaacaactgaatatcttttgccacggcacctgatgccaccagcattaatgttaaacctacaccccatttgcgcatcgcccgctccccagaatttatataatcaaccccaataggttggataagataaagcctgccagaaactaagctaacgattaaagaataaaaaataccctattatatctttaagaaatatacgttccgtaaaatgcaaaaaacccccgcgagcggaggcttttttcagacctggaacgtggattagaacagttttttcgctgtgtcgtaccagtcttctttgaatttgcttttcttgttcttcggatcgatacacacagaaatcaggtcgttaaccattttctcattctgtacgccgacgcaaagaccgcctttgctctgatcaacatttttcatcagcagttcaaccgcataagcacccatacgggaagccagaattcggtcataagctaccggtgaaccaccgcgctgaatgtggcccagtacggttgcacgggtttcacggccagtttctttctcgatatatttagccaactcatcgatatcacagagtttttcggtgatagccacgatggcatgttttttacctttggcgataccggctttgatctcacaaaccagatcgtccggattgaaaggcacttccggaatcgcgataaactcacaaccaccggcgatagctgcagccagagtcaaatcgccacagtagcgtcccatcacttcaacgatagaaatacgttgatgagaagaagaggtgtcacgtaaacggtcaatggcctcaaccacagtatccaacgcagtgaagaaaccgatggtgtagtcagtacccgccacatcgttatcaatggtgcccggcaggccaacgcaggaaataccgccttccgcctgcagtaaatcagcaccggcataagaaccatcgccgccgataacaaccaatccatcgataccgcgcgctttcatgttctcaatggcttttgcacgaatggccggatcgcggaactcagggaaacgcgcagaacccaggaaagtaccgccccggttgatcatgtctgaaacgctgtagcgatccagctgttccatgcgatcttcatacaagccgaggtaaccatcataaataccgaaaacttccagcccttcagacaaagcagcgcgaaccaccccacgaattgccgcgttcatacctggcgcgtcaccgccgcttgttagcacaccgattttctttaccatgactacctctgaacttgtagatgcgattttttgagaattctttattagccgattatgccatgagcacgatactagtacataaaatcaacgctacgaccatgatattggatattatagcaaaaacactatgctgaattgattcaagtcacacgaagtaacggtaaatatttccatcattctgtaacacagtttcaagaatcaacgcaaaattacagctcccaatgagcatggcgctcttttggcactaccgagcaaggatcttgatggataagcacatcagcacccggaaaacggtgtaacaacgcgcgttcaacctgttcagctaaaatatgcgcctgcatcaacggtagatcgtcttccatctccagatgcagctggataaaacgagtcggcccggattgccgcgtacgtagatcatgagcgccaatcactcccggccaggaagtcacagtatcaataatggcctgccgttcttcatcaggtaaggccctatcaagcaatgactgtaccgcttcatagcccatacgcagggcgctatataaaatataaacgcctatacccagcgcaaataacgcatcggcgcggtgaaaaccgtaccaacttaaagccaatgctataagaatagcaccattcatcatcacgtctgattgataatgtagcatgtcggcccgtatcgcctggctttgggttttacgcaccacccagcgctgaaatgtgactaaaatcagggtactgaataacgcgactaaagtaacgccgacgcctataccgggatcttgtaagggttccggcgaggcgagatgctggaagccggttaaaaacaggaataaagcggagccagaaataaacatactttgagccaaagcggccaaagactcggctttgccatgaccaaaggtatgctcttcgtccgctggttgcagggagtaacgcaccacaaacagattagtgagagaggcagccagatccaccagtgaatcgaccaaagccgccaatacgctgacagaaccggtcgcccaccaggcaaatattttaattaacagtagaattgatgctagtgcagtagccgataaggccgcagctttaaccagccgcgcatattgcagatccataacttgtcccaaattgaatcttagggggcaagtataacggataccggcaaaaaaaagccctccatcatggagggctaaaagacagggatggtgtctatggcaaggaaaacagggtattactgggtagtaccttacggtactggatagtactttacttctgggcagaagccggttgtgctgctggagcctgctgcactgtagccatccgctgtttatgcatctggtttaaggcagttttttgctctggcgtcagcaggttgtacatttggttgcgtactttggccatttcgacctgacgctcaacctgttgtttagacattttttcagcctgcgctcgaactgcggcttcatcaaatttatctgcggtaatcagactatgcattgcttcccgatcagcgacaggcattgccgttttagttccgcgatgctggcgcatcagatcgcgcatctgctgacgctgttgctcagtcaggttcaagccttcaaacatgttatggtggccgcgaccacctttcatcattttgccgtcgaagtcgtgacaccagttgccagcggttgcaacagtatcagcggcaaatgcggcggtagagccgaaggccaacattgacgctataactaacgttgttactttacgcatgattaactcctggattcactctgctatgcaattcaatgttaagcagtgtataggtctggctgaaaactagcgtcagtgcatgtaaaactgaggtcaggggatgtaaatctaggtaaagtcatagaatcgcggcaattgttaacgtattttgcgtctagaggtgaaataactatgcataaaattctacttgttgatgacgatcgcgaactaacttcgctattgaaagaattacttgaaatggaaggcttcaacgttgttgttgcctatgacggcgagcaagcgctaaacctgctggacagttcgatcgacctgcttttgctggacattatgatgccgcgtaaaaacggtatcgaaaccttaaaagagctacgtcaacatcaccaaacgccggtgattatgctgaccgcgcgcggcagtgaattggaccgggttctgggtctggagttaggcgcagatgactatttggccaaaccgtttaacgatcgtgaattggtagcacgcatacgcgctattttgcgtcgttccaattggagcgaacagcagcagaatgtagatcaaggcgcaccaacgctagaagttgactgcctgcaactgaatccgggtcgtcaggaagccagctttgaaggtcaggtactagatttaaccggcacagaatttaccttgctgtatttactcgctcagcatctgggccaagtggtttcgcgtgaacttctcagccaggaagtcttgggcaaacgactgacgccatttgatcgcgccattgatatgcatatttccaacctgcgtcgtaagttaccggaacgtcaggatggtttaccttggttcaagaccttgcgtggccgcggatatttgatggtatctgaaacatgatcaacagtttgacggcgcgaatcttcgctattttctggtttactctagcgctagtgctcatgctagtgctgatggtgcctaagctggattcgcggcagttaacgccgttattagaaaatgagcagcggcagggcgtcatgctggaacagcatattgaagttgaactggccaacgatcctgccaatgatttgatgtggtggcggcggctgtatcgcgccattgagaaatgggccccccccggccagcatctggtgttagtgaccagcgaaggccgggtgattggcgctgaacgtcatgaaatgcagattgtacgtaactttattggccaatcggataatgccgatcagccgaaaaagaaaaagtatggtcgatcagaaatggtcgggccattttctattcgtgatggtgatgacaactaccaactctatttaattcgaccagcaagtagcccacagtccgactttatcaacctgatgtttgatcggccgttactgttactgattgccaccatgttgatcagtgcgcctctgcttctctggctggcatggagcctggctaaaccggctcgtaaactgaaaaatgccgccgatgacgtggctcgcggaaatctgaaacagcatcctgaactggaatccggcccgcaggaattcctagccacgggtgccagtttcaaccaaatgatcagtgcgttggaacgaatggttgccgcacaacagcggttgatttccgatatttcccatgagcttcgcaccccgctgactcgccttcagttggcgacagcgttgatgcgccgtcgccatggagagggaaaagagctggaacgcattgaaacagaagctcatcggttggacagtatgatcaatgatctgctagtgctttcccgtaaccagcataagaatgagctagcacgagagccgattaaagctaatgacctttggtctaacgtgctggaaaatgcgcaatttgaagccgaacaggtgggtaaaacgctggaaatctctgctccaccgggcccttggacgctatttggtaatccgtcggcgttggatagcgcgttggaaaatattgttcgtaatgctctgcggtattctcaccaccatatcgcagtagcgttccaagctgataatcaaggcgtaaccatcactgttgatgatgatggccctggcgtcagcgcagaagaccgcgaacagattttccgtccgttctaccgcactgacgaagcccgcgaccgcgaatccggcggtacaggcctaggtttagccattgttgaaaacgccgtaagccagcatcgtggctgggttagggcggaagatagcccgcttggcggcctgcgcttgattctctggcttcctctacacccattcaaagcctagtcatttggccgatcccacaggttcggccagatcgacacattttctcactggccaaatctgcccatatcaacggatgcccactgcaccaaatcggagtttctggtatcctgcgcccctctttactggggggcctatgctgaatattgttttatttgaaccggaaatcccaccgaacaccggcaatatcattcgtctgtgcgccaataccggctgccagcttcatttgatcaagcccttgggctttacctgggatgacaaaaggctgcgccgagcgggcctcgattatcatgagtttacgaatattaagcatcatcatgattatcaggcttttctcgacagcgaaaaacccgagcgcctgttcgcactgaccaccaaaggtacgccagctcatagtgcggtgagttatcaggataaggattttctgttatttggcccagaaactcgcggtttacctgccagtattctggatgcgttaccggcacagcaaaaaatcaggattccaatgcaaccagatagccgcagtatgaatctatcgaacgcagtttctgtggtggtatatgaggcatggcgccagctgggatataacggcgcattggtgaaagagtaagaaatttgtcagaaaggggctcagagtggccccgttcgattaatagcaggaatcagataccgtcgccgtattcaaaaccttggctgacgccgttgaagtgctggtccatatccagggagggtttatcactgtccggtttacccacgatccgagccggtacacccgccgcagtggtatgaggcggaaccgcttgcaataccacagaacccgcaccaattttagcccctcgacctacctcaatattgcccagaattttcgccccggcaccaatcatcacgccttcgcgaattttaggatgtcgatcgccgctggttttaccggtaccgcccaaggtgacggattgcaaaatagaaacgtcattttcaacaactgccgtttcaccaatcacaatacctgtggcgtggtccagcatgatgccgcagccaatggttgccgcagggtggatatcaacaccgaaagccacagagacttgattttgcagataaatagccagcgctttacgctcttgcgcccataaccaatggccaattcgataggcttgtaatgcgtgaaaacctttcagatacagcagtggcgtagagtatttatccaccgcagggtcacgcaagcgcacagccaaaatatcgcgcgcggcggaaacaatcatatggggatcgctgcggtaagcgttttcgaccacttcccggatagcaatagcaggcattatgggatcggctaatttattcgccagaatatagcttagggcactgcctaaattctcatgctttagcaatgtcgcatgaaaaaagctggccagcatgggttcacaatcagccagcgcccgcgcttctgatttaatgctgctccagacctgctctaattcttctgacgacatgccttactctccctatgatacaaacaagtcaccccgaggaaaccccaaggtgacttagtacgcattgatctaacgggttaaacgccgcttttttcgtcttttttggtgcgccctaataaggtcagggcagcttcgcgggcatttttatggcagtacagcacctgatagatctgttcggtaatgggcatttcaacaccataccgttgcgccagagctaatacttccttggtatttcgataaccttcgacaacctggccaatcttgtcctgcgcttcttgaacccctgcgccctggcccagcatgataccgaatctgcggttgcgagattgattatccgtgcaggttagcaccaaatcacccagccccgccatgcccataaaggtggaaggatcggcacccaacgcggaacccaaacggctcatttcggccaaaccacgggtaatcagcgccgttcgcgcattcgcgccaaaaccgatgccgtcagacatacctgcaccaatggcaatcacgtttttcaccgcgccgccgagctgcacgccgataaaatctgggttgctgtaaacccggaaacttttaccgcagtggagcagcgcttgcaggtcttcgctgaactgagcgtccgttgaagccaatgcaatcgccgtgggcattcctgccgccagctctttagcaaaagtcggcccggaaacaaccgccagcggaattgtatcgccgaggatttcccgtgctacatcctgtagcaaacgcccggtttcagcttccaaccctttggttgcccaaacgatacgcgcatcgctgcgtaaatggggttttaactgatgtaaaacgttgccaaaaacgtggctcggcactaccaccagaatattacgactgaccgccagtgcgcgggacaaatcggtttctagcaataatgtgtcggggaaagggacgtccggtagaaaagcctgattacagcgagcatcctgcaacgcctgaatgtgtttgggatcgtgtccccacaacacaacggtgtgaccattacgcgctaacgtgatggctaatgcggtgccgtaagatccggcaccgattacagtcattgaagcatcagtggtgttcatcaggcatcctgacgttgttcggcaccttcgccttcagtttgagcctgctgctgcaaatagttcatgaacagggcatcaaaattaaccggtgccagattcagctgagggaaagtaccgcgggaaaccaggctggtgatacattcacgggcatacgggaacaaaatgttcgggcagtatgcgcccaggcaatgtgccagttgggtgccatcgatgccagcaatggagaaaataccgccttgctgaacttcacacaagaatgcagtttcttcgcccagagaggccgtaactgttacgcgcagtaccacttcatacacatcttcagccagctgactggaagcagtatcaagatcaagtttaacttctggctgccaatcctgctggaaaacctgcggtgcatttggcgcttcgaaagagatatccttggtataaatacgttggatctggaaagccatctctgtgttgttttgttctgacatgtgtaaaagtacccttagttagacatccttattaaacagcactaccgccgtgggaatccccatcgacgagtttaaagcagtgggtcaagcccaccgcgcgcatccagcgcatgtaaatcatcgcagccacctatgtgctgcccatcaataaatatctgaggtacggtggaacgtccgctgcgttcaatcataacttcacgcgtcgccatatcaccatcaatcgcgatttcctcgaacgctgcacctttgctgtttaacagcgcttttgcgcgaacgcaaaacgggcaggtcgctttggtgtatatctcaattttcgccattgacaaaacctcagttatattaatattccgttgataaagcgatggttttattacttaccacgttttatttaccgcgagccagaggcagattttcaccgctccagccagagataccctctttcagagtaaatacaggttcaaaaccggctttgttcaaattttcggcagacgtacgagacgcagtaccgttagcacaaacaacaataataggctgcgctttatgcttttccaactcgcccaagctgccgtttttaatttcagtcggcgttaggttaatggagctggcgatatggcccttgcggtaatcttcgcgcgaacgggtatcgacaacaaccgcatcttctttgttaatcaaacgcgtagcttcaccacgagtgatttcttttactttagacaggctgcttttaaaggtggtgacgatcacggcaaccagcaaagccacccaagccagactcaaaataggatgctggctaatgaattgcataatttcttgcaacatagggggaaaaactcccgttagttaggggtcaatattcaaggtcacagagtatacctgcgcgttgcagcaaatacagccagtaagcaagtggtattgcagaaactgagagggatcgcggaaagttttcatcatttaaaccaccacaatcacgcccatcccacgccaaccttgatctctttgggctatttttaacctgctttgtagtaaaattacgaaagcgataagtgtcaatagccatgagcgacccacgtataacccatgcctattaacacttggacttataagaaaatgaggttaagcaatgtcgagcaataaaaaaccattagttctgactattctggatggctatggccaccgtgaagaccatcaggataacgctattttgaatgccaaaacgccagtgatggaccgcttgtggcagcaaaatccgcacacgctgattgctgcttccggtctggacgtcgggttgccagacggtcagatgggtaactctgaagttggccacgtcaatctgggcgcgggtcgcattgtttatcaggatttaacccgcctagataaagagatcaaagagggcgatttctttgttaacccgacgctgaccgccgccgttgataaagcagtaaaagctggcaaagcggtacacatcatgggcctgctatccgccggtggggttcacagccacgaagcgcatattctggcgatggtcgagctggctgcccaacgcggtgccgagaaaatctacctgcacgccttcctcgatggccgtgatacgccgccgcgtagcgccgagtcctctttgaaaatgtttagcgataaatttgctgcattaggcaaaggccgtatcgcctccattattggtcgttactacgcaatggatcgcgataaccgctgggatcgcgtccaactggcttatgacctgctaactcaggccaagggcgagtttaccgcagccaacgccatgcagggtttggctgatgcctatacccgcggcgaaaacgacgaatttgtaaaaccgacggtgattcaagccgctggcgaacccgatgccgctatgaatgatggcgacgcgctgatctttatgaacttccgcgccgaccgcgctcgtcagatcactcgcacctttattaatccagactttgacggcttcaagcgcgataaagtagttaacttcggcgatttcgtgatgttgaccgagtatgcagccgatatcaatgctgcctgcgcttatccgccagcatcactggttaatacctttggcgaatggttaatgaagcacgataaaacccagttacgcatttctgaaactgagaaatatgctcacgtcaccttcttctacaacggcggcgttgaagaaccatttaaaggtgaagaccgtattctagtgaattcaccgaaagtggcgacttatgatctacagccagaaatgagttctgccgagctgaccgaaaaactggtcggggcgatcggcagcggtaaatacgatgtcatcatctgtaactatccaaatggcgatatggttggtcataccggtgattatgatgcggcagtaaaagcgatcgaaacgctggatggctgtattgcacaggttgttgatgcagttaaagctgctgacggtcagttgctgattaccgcagaccacggcaacgccgagcaaatgcgcgatccggcgacaggtcaggctcacaccgcccacaccagcctgccggttccgctgatttacgtcggcaataaaccggttgccgcggtggctggcggtaagctttctgatatcgcgccaaccatgctgtcactaatggaaatggaaatcccgcaagagatgactggtaagccgctgttcatcgtggaataatcctttcttatgaaggataaggcgttatttgcacgtttgatggtgactgaaaacgcaacccccggcagcagccaatccccagtgggcctgctgccaacccggtttacgcgtcgtccgttagccatactgtacgccagcgttttttgcgctggcgtcttgctattgccattatccagccaggctgcagatgctcccgttgctgcaaaaacggccgataacaagagccaattgaaaactattcagcaaaatattgctgaaaaagagaaaagcgttcagcaacaaaaacagcaacgcagcgcactgctcgatcagctgaaacaacaagaaaatactattgcccaagccagccgtagcctgcgcgacacccaagccactttgactgagttgggtaaagacgtcgccaagctcaacggctcgattgaaaaactgcaaagtcagcagtcactccagcaaaatattctagctaaacagttggatgcagcctttaaacaagggcagcacagcggattgcaactcattcttagcggtgaggaaagtcagcgtagcgaacgcattctggcctatttcagctatctgaatgaagcccgtctgaaatcaatcaatacgttaaaacagactcgaagcgatctcgcggtgcagaaaaaaacgctggtagaaaaacagcaacagcagaaatccctattgaacgaacaacagtctcagcaacagaagctggaacaggctcgttcagcacgtaaaaaaacgctgatttctctggaagcctcgctggaaaaagaccagcagggtctggcggaactgaaacagaatgaaacccgtctgcgcgatcaaatagccaaagcagaacgggaagccaaagcccgcgctgaacgagaagccaaagaggccgcgcgggttcgagagcagattaagcttaaagagcaacaagcgaagaaaaccggctctagctataagccgagcgaaagtgagcgctctctgatggcacgtaccggcggtttaggtcgcccaagtgggcaggctttgtggccagtacgcggtaatgttacacatagatttggtgaagtattacagggagaactacgctggaaaggtatggttatttccgcgccagaaggcagcgaagtcaaagccattgccgatggccgcgtcctgctggccgactggttacagggctacggtctcgtcgtcgtcgttgaacacggtaaaggcgatatgagtttgtatggttataaccaaagcgcgttagtcagcgttgggactcaggttagagccggccagccgattgctctggtcggtaccagcggaggccagggtgagccttctctgtatttcgagatccgtcgtcagggacaggcggtcaacccacaaccctggttaggaagatagggaattgaattagggaaaaagcattgcgctattttaaagctcgctcactgtttgtattcggcactttgctgatagcctgctccgcgcaggcaggaaaattatctattgttatcgatgacttcggttatcgcccgcagaacgaaaacaaaattctccagatgccgttaccgatctcggtggccatcttgcctaatgctccccacgccaaagaaatggccatcaaagcccacagccaagggcgtgaggttcttatccatctgccgatggcacccttgagcaagcagccattagaacgggatactttgcagcctaatatgagcagcgaagaaattcagcgcattattcgtcaggcggtaaacaacgttccttacgccgtaggtatgaataatcatatgggtagcgcaatgacttccagcctgtccggaatgcaaaaagtcatgcaggcgctggaacattatcagctgtattttctggatagcgtgacaatcggcaatactcaggccagccgggcagcggaaggcactggcgttaaagtcataaaacgcaaagtttttctggatgatgtgcagaatgatgcggctattcgtcagcagttcaatcgcgccattcagctagcgcgtaaaaatggttcggctattgccatcgggcatcctcatccctctaccattcgggtattgcagcagatgctgccggaattaccgtcagatatcgtattggttcgccctagtgcgttactgaatgaaccggtgcagcataattcaggcacgctgacgccagtcaagccggttaaatcacgcgatccgtttaaagacagcaggttaaaagccattaagcaatgtaaaatgaaagcgggacatacgccagagaaaatctacgccgacgagatgtttaaaattctgggggaaagtctgatacaaagcccagtggcgactttcgtgcagcagcgctggcatttctggtttaacaaaaccaaataaaacaatgccgggtcatcatgcccggcattgtttatctacctgatagaatctcagttagccgttaatcccagctcaatacgactttccctgattgaccagagcgcatagcgtcaaagcctttctggaactcatcgatagagaaacggtgagtaatgattggtgttaaatccagaccagactgaattaatgcagccattttgtaccaggtttcgaacatctcgcgaccgtagatacctttaataaacagccctttaaagataacctgattccagtcgatagacatatcggatggcggtatccctagcatggcaatgcggccgccgtggttcatcgcattcagcaaagtacggaaagctggcggcgcgccggacatttccagacccacatcaaaaccttcggtcatacccagatcagtcatcacgtcgttcaggttttctttactaacgtttaccgcgcgagtgacgcccattttgcgcgccaaatcgaggcgatattcattcacgtcagtaataaccacgttacgcgcaccgacatgtttacacaccgctgcggccatgatgccaataggaccagcgccggaaaccagcacatcttcccccaccagatcgaaggacaatgcagtgtgaaccgcgttaccaaacggatcgaaaatggcggccagctcatcgggaatgttgtcaggaattttgaacgcattgaaggcaggaatcaccagatattcagcgaatgaacccgggcggttaacaccgacgccaatggtattacggcacaggtgagtgcggcctccgcgacagttacggcaatgtccgcaggtaatatgcccttcgccagaaacgcgatcgccaatggaaaaacctttaacttcctgaccgatagcgacaattttaccgacgtattcatgccctacaaccataggaaccgggatagttttttgtgaccattcatcccagttataaatatgcacatccgtaccgcaaatcgccgttttagcgattttgatcataatgtcattgtgacccaattcaggctgaggcacatcggtcatccaaatgccttcttccgctttcagcttagatagtgctttcattgaaattccttatgcaataacgcctagttgtttaccaatgcgcacgaatgcattgatggtacgttcaacctgctcagtcgtgtgttcagcagacatttgggtgcgaatccgcgcccgacctttcggcacgaccggataaaagaaaccggtaacgtaaataccttccttcagcaacgcgttagcaaattcctgcgctaatttagcttcgcccagcattaccggaataatcgcatggtcggctcctgccaacgtgaaaccagccgccgtcattttttcgcggaatagacgggcgttagcccacaggcgttcccgcagagcatccccttgttccagcagagaaaggacttcaatggacgctgcaacaatcgccggagccaatgagttagagaacaggtacggacgtgaacgctggcgcagccattccaccacttctttacggcctgcggtatagccgccggatgcgccgcccaacgctttacccaaagtaccagtgataatatcaacacgacccatcacttcgcagtattcatgggtgccgcgcccgttggcaccaacaaagcctactgcgtgggaatcatcaaccatcaccagcgctttatattgatcggccaaatcacaaacgcctttcaggttagcaatcacgccgtccatagaaaacacgccatcagtggcgatcatgatatgacgagcgccgtccgcttttgcctgcttcagttgggtttccagctcagccatatcattgttagcgtagcgataacgcttggctttacacagacgcacgccgtcaataattgacgcatggtttaacgcatcggaaataatggcatcttccggccccaacagcgcttcaaacagcccgccgttggcatcaaaacaggaagaatagagaatggcatcttccatccccaggaagctggcgatcttctgctccagctgcttgtggctgtcctgcgtaccgcaaataaagcgcacggaggccataccaaaaccgtgtgtgtccatcccttttttcgcggcagcgatcagcgccggatggttagccagccccagatagttattagcacagaaattgattacatgacttccatcagctacagcgatatcgacttgctgggcggaagtgataatccgctcttctttatacaaaccttcagcacgggtagtagccagttgttgttctagttgttgatagaaagacgcgggcattcggttatctccagatttggcaatttcgcctcacattttactaagttgctggcttactgacgagaaaccttgttagagaatgtaagaaatgcagcatatatcacggggaactatcctaaagccccatacaaaaagggcgattaccccccttccggctgtgcgcttacgcatgaaatgttatgatggcaccaaataatgtgtagggcattgtgcccaaccaagcagattaataagggtgaacctgatgattatcgtcactggcggcgccggttttattggcagcaacatcgttaaggcactgaatgatataggatataaagatattctagtggtagataacctgaaagacggcactaagttcgtcaatctggtcgatctggacatcgcggattacatggataaagaagattttgtcgctagcattgttgccggtgatgatatgggcgatatcgacgccatcttccatgaaggcgcttgctcctctaccaccgagtgggatggcaagtacatgatggataacaactatcagtactccaaagacattctgcatttctgtctggatcgcggtattccattcctgtatgcctcttcagctgcaacttacggtggccgaaccgataatttcattgaagatcgccaatatgagcagccactgaacgtttacggctactcaaaattcctgttcgatcaatatgttcgtgaaattctgccgcaagcggattcacaaatttgtggcttccgctatttcaacgtctacggaccgcgcgaaggccataaaggcagcatggcgagcgttgctttccacctgaacaatcaaatcaacgctggtgaagcacctaaactgttcgctggcagcgagaactttaaacgcgatttcatctatgtcggtgacgtagctgcggtcaatctgtggttctggcagaacggcgtttccggtattttcaactgcggaactggccgtgccgaatccttccaggcagtggcggacgccgtggtggaataccatcagagcgggccagtggaatacattccattcccggaaaaactgaaaggtcgctatcaggcattcactcaggccgacctgaccaacctacgcgcagccggttatgacaaaccgttcaaaaccgtcgccgaaggggtaaaagagtatctgggctggttaaatcgccctatttaagtcattcgctgcaaggaattgataacggtatgagaatactggtcatcggcccttcttgggttggcgatatgatgatgtcgcaaagtttgtaccgcaccctgaaggccgaatatccggcagcagagattgatgtgatggcacccgcgtggtgccgtccacttctggccagaatgccagaggtgcgccgcgctatcccaatgccgctcggtcatggggtatttaatctggaaggccgtcgccgtttgggtatcgctttgcgcgaggaagcctatgatcgcgcctatgtcttacccaattcgttcaaatctgcgttaataccctacttttccggtattcgtcagcgtacaggctggcgcggtgaaatgcgttatttcctgctcaacgatatgcgcattctggataaacaggctttcccgctgatggttcagcgttatgttgcgctggcttacgataagtcgcgaattacttccgaagccgatctgccgcagcccattctctggccgcagttacaggtgcaggatgaagaaattgcggaaaccaccgccgcttttaatctcagcgataatcggccaatcatcggtttttgtcccggtgccgaatttggcccagccaaacgttggccgcactaccattacgccactttggcacaaaaactcattgatgacggttatcaaatcaccctgtttggttctgaaaaagaccataaagcgggagaagatattcgtcaggcacttcaggcagaaagtcgcgatttctgcctgaatctggctgggcaaacgacgctggatcaagcggtaatactgattgccgcctgtagcgccgtggtgagcaacgattccggcctgatgcacgttgccgccgcgttgaacaaacctttggtggccttatatggcccaagcagcccagccttcacaccgccactttcagataaagcgacggttattcgtttgattaccggctaccacaaagtgcgcaaaggagatgccgatcaaggctaccaccaaagcctgatcgacattcagccagagcaggttttggccgcactacagctgcagttggcaacacagtcttcaacggtaaatgaggcgcactgatgcacgtattgatcattaaaacctcatcgatgggtgacgttttgcatacgttacccgctctgaccgatgcaatgagcgccattcccggaatccgtttcgattgggtggtagaagaagggtttactcagattcccagttggcatccggcggtggataaagtgattccggtggccattcgccgctggcgcaaaaactggtttggtagtgatacacggcaagaacgctgtgacttcaaacgaatcgtgcaagagcgcagctatgatttggtgatcgatgctcagggcctgataaaaagcgcggcgctcatcacccgcattgccaagggcacccgacacggcccagattgcaaaagcgcccgggaacccttcgccagttggttttataactgccgtcatgaaatagacaagcagctacatgccgttgagcgtactcgccagctctttgctaaaagtctgggttataccaagccggaaaccgtcggtgattacgctatcgctcagcgtttcctcagccagttaccgccagacgctgggcaatatctggttttcctacatgcgacgacccgtgacagtaagcactggccggaaagccattggcgtcagttaattcagttggttcaacctactgggctgaaaattaaactgccgtggggcgcagagcatgaatatcaacgcgcagtgcgtctggccgataatttccctcacgtggaagtgctgccaaaactgagtttacagcaagttgccgaggtattagccggtgccaaagctgtggtttccgttgataccgggctaagtcatctaacggcagcgttagcgcggcctaacatcacgctgtttggcccaaccgatcccggattaattggcggttatggtgaaaatcaggtatccgttatctctaaagagaaaagcatggataccattcaagccaaaattatcatggcagaattggataaaatcatcgtctaagtgaccgaatcccctcatctgcgcagcctctctcgctgcgcagttttctcttaactctcactgattaccctttatcagacgaatattttgccgctcgcttcgctgcggaaaatattaataatatgctgttagtttttaccgtgataattaactattacatgcatgagaaaatgatatttaagtaagaataagtcatttatccgcagcgatattccggcgattaacgaaagtaattaaaggaaatctctaataaaggcgatcatcttcataacgaccaatgggttaagcaatgtcatgaagcactcagatattttatctctctgtaatacggatattttcaggttaatagataaaaaataatcaccaataaacttctcactcttatatgctgtttttcgcctttttactgtaatcagtcttattctcgataagataaaaatacccgttcaaaccagggaacgggttcggtttttatactgattaatatatgagcgggtaaaatagatcggcgctagccaccattggacattacataaccggaagagagcctttcttcagcagttatggtattattctgaataactcatataaatgaatttgatagaatgttgctgcgtttatatcaggtactcctctacctaatccaacctttgatttggctgcgattgttgctacgtagccgtaaagcccctgcttaccgtaagcgctggggagaacgttatggtttctgtgccggtaaagtggtctctggcggcattatgctgcattccgtttctgtcggtgaaactctcgcggctattccgttggttagagctttacgccaccgctatccctcattgccgattacggtaacgaccatgacgccaaccggttctgagcgagtgcaatctgcctttggcaaagacgttcatcacgtttatctcccttatgatcttcccggttccgtaaatcgttttctcgatcaggttaatcctaagctggttatcatcatggaaaccgagctatggccaaacctgattaatgcgctgcaccaccgtaaaattccattagttatcgccaatgcgcgactttctgcacgttcagccgcaggttacaaaaagattggcggttttattcgcaatatattgcgacgtatcacgctgattgccgcgcagaatcaggaagatggtgagcgttttatcgaattgggtctgaaacgatctcagttgaccattactggcagccttaagtttgatatctcggtcacaccagaactggccgcacgagcaataaccctacgccgccagtgggctgcccatcgccctgtgtggattgcaaccagcacccacgacggcgaagaagccattttgctggaagctcatcgtcaattgttattacagtatccaaccctattattgattctggtgccacgtcatccagaacgtttcccgaaagcgattgaactgacccaaaaggccggattcagctacaccttacgcagcggtggcgaagtgccatccagcagcactcaggtggtgatcggcgataccatgggtgaacttatgcttttatatggaattgccgatatggcatttgtcggcggtagcctgatagaacgcggtgggcacaacccactcgaagccgctgcccacgcgattccagtgatgatggggccacatactttcaatttcaaagatatctgtgccaagcttgagcaggccgaagggctcatcaccgtcaccgatgcagcctcgctggtgaaggaaattagcgtactgctcaccgacgaagattgccgcctctactatggccgccatgcggttgaggttctgcatgagaaccaaggggcattgcagcgattattgcatctgttggaaccttatttgccgccgcggagccactaatgagcgccaaaaaacgtctgtctgtggtgatgatcaccaagaatgaagcggatctgctcccagaatgcctggactccatttcctgggctgatgagattgtcgttttagattctggcagtgaagacgacactttggatttagctcgtcaatacggcgcgcaggtatacagtaacgttcagtggcaaggttttggcaaacagcggcagcgagcgcagcaatacgctaccggtgactacattttgatgatcgatgccgatgagcgcgtcacacctgaattaaaagcctctatcgacgtggtattagcgtctccggatgatgatgccgtgtatagctgcggccgcagaaatctgtttttggggcgttttatgcgccatagcggctggtatccggatcgggtgacgcgtctgtatgctcatcatcgatatcaatataacgataacctggtgcatgaatctgttgatgccggaaatgcgaaagttattccgctgaaaggggatttactgcacttaacctgtcgtgatttttttgcttttcagcgtaaacaactcagctacgccgaggcttgggctacacaacgccaccaacaaggtaaaagctgtagttatttctctattcttagccatactctcggcgctttttgcaagacctggctgttccgcgccggatttttggatggtaaacaagggttattgctggccgtagttaatgcgcaatatactttcaataaatacgccgccctgtgggcactcaaccaaaaataacgcaaaagcgagacgccatgatcaccagagccatttatccgggcacctttgatcctatgaccaacggtcatctggatttagtcactcgtgcgtcttccatgtttggccatgtcattttggccattgccgatagttcacataaaaaaccgatgttcacactggatgagcgcgttgcattagccagcgaagtgacagcgcatttgaccaacgtggaagtgatcggttttagcgaattgatggcaaccttcgcccagcagcataaagcgaatattctggttcggggtttgcgctcggtatcggatttcgaatatgaatggcagttagcgaatatgaatcgtcatttgatgcctacgctggaaagcgtatttttactgccatcagagaaatggtcattcatttcctcttcgttagtaaaagaagtggcgcgtcacggcggcgatatcacaccattccttcccgcgccaattaccaaggctttactggataaactctgagtttacctctgatttaatgctggcagtgacggcagaaaaacgtgctgcgctgcccatgtttcgcactttcaatcagatgaccacagcgcctgcacggctcaccggctcgaccataaacctgtaattcctgcgcaaagtaccccggtttgccatccgactgcaaaaaatcacgtagcgttgtgccgccctgctcgatagcgcgcagcaataccattttgatagttgcaactaataatccgacttctgcttcagttagcgaacccgctgggcgatcgggagcaataccggcgacgaacagcgattcactggcatagatattccccacacccaccacaactttattatccataatccactgtttaaccaaggttcgcttattgcgagacaggttaaacaggtaggaagcgctaaattcatcgcttaacggctcagggccgagatgagccagcacgttgctggttgccaaatccgaagcccatagccatgcaccaaagcggcgcgggtcggtatagcgtaatattttgccgttactgatcaccaaatccacatggtcatgtttttctgcctcggtttcctccggcaaaatccgcaaactgcctgacatacccaaatgaatgataatccagccttttggcaattccagtaacagatatttggcacggcgttgcacactcagtaccagttgatcgctcagagccagtatttcatctgaaaccggccagcgcagacgggaatttctgacgatggcatattgaatgctgtggccgaccaggtagggttcaatcccacgtcgactggtttcaacttctggtaattcaggcatttaacctccgattcaacgtgtttaccgacctttatataacaaaaaacccggccgaagccgggttttttattaatccactaaaattatttaattttagcttctttgtagatcacgtgttgacggacaactggatcgaatttcttcagttccaatttttccggcttagtacgcttgttcttcgtggtggtatagaagtgaccagtaccagcagaagaaaccagcttgatcttctcgcgaacacctttagccatgattcagttccttaatacttctcaccgcgggcacgaagttcggccaagaccgtttcgatacccttcttatcaataacacgcatacctttagcagatacacgcagagttacaaagcgcttctcgccctcaacccaaaaacggtgagagtgcaggttcggcagaaaacggcgtttggtcgcgttcattgcgtgggaacggttgttaccgctcaccgggcgcttgccagtaacttggcagactcgggacatgtctattctccaaaaatcaaatcagctcgagcttcgtatagggtatggccgcctcgtcaggctttagagcccatctcagcaaattcactgagaagactcaatgtcatcaggtcagaaacccctgtcaccaggtataaacctgctgagataggctcttcacgccaaacccaagattctcaaaggtggcgtagtatacgctctgaagcgtaagtgctcaagtcccgaacagctaaagatcccgaaaggatcgagaaaatatctctaaatccagcctcgttcagcaaaagagacacattcgccacggccaaccactaaatggtcgagcaccctaatatctaataatgagcaggcttttaccacctgcgcagtgattaaacggtcggcttggctcggttcagccttccccgacgggtgattatgcgccagaatcaacgcaacagcattaacctttagcgcttcacgcacaatttcccgtggatggacctctacgctggtgatggtaccagtaaacatctcctcatggcgaataacacgatgctggttatccaaaaacatcactaaaaatatttcccgctcacgttctgacagcaaattttgcaggtatttttgcgtcattcgcggatttaacatcgcattctctttagtcatatggtcagaaaaacatctggtggccaattcggaaatggcatgaatctgactatatttagattttcccatgcctttttgtgcacaaagcgtcggataatccgccgacatcaaacgatatagagagccaaattcggcaattaggtgctccgccatcgccatcacatgcagacccggaatgcccgttcgtaaaaatatggccagcaattcagcatcacttaacgcctcagcgccatacttcagtaatttttctctgggtccatcccctttcagccatagttccatcctagaactcccctattctcaatgccggagtatcatgccatggccggattatcctcacgacaagcatcaataaatcctgcgtgacgccacgcaaatttcagattgatcgctaacctacgttgccccctatagcaaaactgccgatgggttatgctaaaatatcgcctctttcggctttcattcggacaatcatgatgacgggactttccggcaaacatattgtgctcggtatcagtggtggcatagccgcctacaaatgtcccgagctagtacgccgcttacgcgataaaggcgcagacgtgcgggtagtgatgacaacggctgccaaagcctttatcactccgctaaccttgcaggccgtttcgggatatcccgtctctgatgatttgctcgatcctgccgcagaagccgctatgggccatatcgagctggggaaatgggccgatctggtcatcatcgctccggccaccgccgatttactggctagagtggctgcaggcatggccaacgacctgctgacaacgctttgtctggcaaccgcagccccagttgccgccgttcccgcaatgaatcagcagatgtaccgcgcgagcgctacacaggccaacctgcaaacgctgggaagccgtggcgttttgctttggggaccggacagcggtagtcaggcctgtggcgatatcggccctggccgcatgcttgacccattggaaatcgtggcattggcggaaaatcatttttctgtaaaacaagatctgcaacatcttcatgtcatggtgaccgccggtcctactcgtgaagcgctggatccggtacgttttatcagtaaccacagttcagggaaaatggggttcgccatcgctcaggcggcagcgcagcgcggcgctcacgtcactttagtcgctgggccggtcaatctgccaacgcctgccggagtcacgcgcattgatgtgattagcgctcttgaaatgcaaagcgccgttcagcaagccgcccctcatcagaatatttttatttcctgtgcggccgtagcggattaccgggcggaacaggttgctgatgaaaaaataaaaaaacagggtgatgaaatcacgctgaaaatggtgaagaatccagatattgttgctggcgtcgccgcaatgacgaaaaaacgtccatttgtcgtcgggtttgctgccgaaacccagaatgtggaagaatatgcgcgacaaaaactggtgcggaagaatctggacctgatttgcgccaatgatgtttcgctcgcagagcatggttttaatagtgataccaatgcattgcaccttttttggccgaacggagagaaacgcttgccccacagcgataaatccctgcttggtcagcgtttaatagacgagattgtcagccgttatgatgaaaaaaatcgacgttaaaattctgaatccacgtattggcaccgaatttccattgccgacctacgccacacctggctcagctggcttggatctacgtgcctgcctggatagcgcagtagacctggctccggggcaaacgactctgctgccaaccggtctggctatccacattggcgatactggtctggcggcggtaattctgccgcgctcaggtttaggccataagcacggcgtggtgttaggtaatctggtcggcttgatcgactccgattatcaggggcaactgatggtttccgtgtggaaccgtggccagcagtctttcactatcgaaccgggcgaacgtattgcccagatggtgtttgtgcctgtagtacaagccgagttcaatctggtcgaagattttgacctcagcgaacgcggcaccggtggttttggtcattctggacgccaataacctaccctaaacctcgataccgtaaaaaagctatcacataagccgcctgggcattgtatccagcgcggccggtgttcaggtttttgttaattaagtcatttttagcaagggtctaatcggacatggcagagaaagaaaatacgaaaaggaatcggcgcgaggaaatattgcaagctttggcgcaaatgctggaatccagcgatggcagccagcggatcaccaccgcgaagcttgccgccaacgttggtgtttctgaggctgcgctatatcggcatttccccagcaaaaccaagatgttcgatagcctgatcgagtttattgaagatagtcttatgtcccgcattaatttaattctgcaagacgaaaaagaaacttttaatcgtctcaggcttattctattgctggttcttgggtttgccgaacgcaatccagggctaacccgaattatgaccggacatgctttgatgtttgagcaggatcgtttacagggccggattaatcagctatttgaacgtattgaagctcagctacgtcaggtattacgagaaagaaagctacgggaaggtcagggctttgcacatgatgaaaccctgctggcgacgcaattgctggctttttgtgaagggatgctgtctcgctttgttcgctccgaattccgctatttgccaacgcaagagttcgatgcccgctggccgctagtgatggcgcaattacaataggtgacggccaatagtcagtcaccgcaaaaagtaaaaagggccaattggccctttcgtctttgcactttgttttcagcaaaatggcttaaacgccgtaattctcgcgataaacacgaaccgcggccagatgatcggccatttccggtttttcttccagataggtaatcaaatcattcaaagtcacgatagaaatgactttgcagtgataatcccgttccacttcctgaatagctgaaatttcaccgcggccacgttcctgacggtctaacgaaatcatcacgcccgccagagaagcgccctgcgcgccgataatctccatggactcacgaatagcggtacccgcggtaatcacatcatcaaccagcatcacacgcccttgtaacgggcttcccaccaggctgccaccttcaccgtgatctttcgcttccttacgattaaagcagtaaggaacatcgcgctgatggtgttctgccaatgctaccgccgttgtggtagcaataggaatccccttgtacgcagggccaaacagcagatcaaactctacgccacaatccatcagggctgccgcataaaaacgccccaataacgccagatccagcccggtgttaaacagtcctgcattaaagaagtaaggactgatccgccctgacttcagggtaaactcgccgaacttcaaaacctgtttgttaagcgcaaactcaataaaatcgcgctgataggctttcattggtgtatctcctttccagattagtgactgctgtggtcagttaccgcatctatcctcgataaaatgctctcaggcaaccgggtataaaaaaggcgactatcaggtcgcctttataaaaattattgttccaacgccgctttctgcgcctggaagatggtttctattcctccccgcgccaaagccagcaacgccagcaactcttcatggctgaacggttcgccttctgcggtgccttgcacctcaatcattcgaccatcttccatcatcaccacgttcatatcggtttctgctgcagaatcttccacatattccaaatcgcacagggcctcaccttttacgataccgacagagacagcggcgaccagccctttcatcgggttagctttcagtttacctttggcaaccaatgcattaagcgcatcggccagtgccacacaggcaccggagatagacgcagtacgagtgccaccgtcagcctgaatcacgtcgcagtctaaagtgatggtgaattcacccagttttttcagatctaccgccgcacgcagtgagcgggcgatcagacgctggatttccaatgtacggccaccctgcttgcctttagcggcttcgcgcgggttacggctatgcgttgcacgcggcaacataccgtattcagcggtgatccacccttgtccctgccctttaagaaaacgcggtacgccttcttcaacggtcgcggtgcacaatactttggtatcgccaaactcaaccaacacggaaccttcagcgtgtttcgtataattacgggtcagggttaatggacgtacttgttctagtgctcggcctgctgggcgcatgggaattctccggcgttaaatcgatattggtcgcgcattatacggccttagtgatgtaatgcctatcctgcctgaggctgcgaggctataatccctgcatcttttctttgaaacgggtacgcaacgatgatccgcagcatgaccgcctacgcccggcgtgatattaagggtgaatggggcagcgcagcctgggagctgcgttccgttaaccaacgttatctagaaacctacattcgcctgccagaacagttccgcagtctggaaccggtcattcgcgagcgtattcgctcccgtctgactcgaggcaaaattgaatgccatctgcgcttcgagatggatcctacagcacaaagttcactgatcctgaacgaaaaactggctaaacagctggttgaagcggcgaactgggtcaaaatgcaaagcgacgaaggcgaagtcaatccgctggatgtgctgcgctggccgggagtgatgtctgctgaagaacaggatttggatgctattagcaccgaactgatgcaagcgctggatattgctctcgatgactttattgttgcccgcgaatctgaaggtgcagcgctgaaagccatgattgagcagcgcctggatggcgtaagcgcagaagtggttaaagtccgagctcatatgccaaacatcttgcagtggcagcgtgagcgtctgctaagcaaattggaagaagcacaggttcaactggaaaacacccgtctggagcaagagttggtgctgatggcgcagcgtgtcgatgtcgctgaagagctggatcgcctggaagctcacgtgagagaaacgcataatattctaaagaagaaagaggccgttggtcgccgtcttgattttatgatgcaagaattcaaccgtgaatcgaacacgctagcgtcaaaatctattaatgcggaagtcaccaattcagcaattgaactgaaagtacttatagagcaaatgcgcgagcagattcagaatatcgagtaacttctcaccgcatggcaagataatagaaagcctctaaagcccgtaatctggactgaccctataaaaagttggacagtccagattacgggctcattaatatccagattgactttattcaccgataaaacgtaagttccaattaaatacgctgtagttaaacatgtagcgtatggcgacatacgtaataatcagggtagcgacgacagcctcaaaggtagccagataataaagttggtagctgtaatcttgtactaattcatacttgctcaccaaatccgctaatttatataacgctgtcgcaccaattgccattgggaaggtaaacgcagcataacccgggctaaacggcaattttagtaaacggaagaatgacatgtaaattacgcaagtcattaatatcgcaataccgaacagtaatgcacataccagtaaagaaggatttggcactacggttaaataacctgccaaactaaggctcgcaggagcagccataatcgcaatggttggcttcgctgcatccggaacttcgcggcagaacataaaacgatagatcatcagcggcagcatacatgcgtaactcaacataccgatgactaacaataaatacgcaacacccataaaggcctgattaggcaccgcaacgtcagccacaataatcccaacgggcggaacaaaccaactcggcaccatatgatgcatttctatttcttggatccgatgataaataaataccgcaagaaaaatcaggtgcactactaccgccagtgaccacaagatctcacccgccaacatactcaaattgcccaaggctttggaaaccaccatacaccccatggtaaaggtaggaaccacgctacccaccacaggatgttttaaatctgataataaaactctgaagtgaaaaataaatttactggctacggcaagtagcagcaccgatgcgattatcgccccgatattttgacctaaaccgtttaagggtaatgcattttccaggcaccaacctatacttgaaatacccagtgccagaccggcgataggcgtcggtaatcctctgattttactatgtataatttctaacatgttaccgccaaaagcataatctacataaatgaatagggcaaatatagatactcacctttgtttaggatatcctttttttattgacttagcgtttagaagaaataaacaaatggatatcacgttgaagcaattgaaagttttcctagcggtagcgcaaagcggcaatttaacggtcgcagcctcccaattgtttatgacgaaaggagctgtctctcaaaccttggctgagttagaaaaacgtctgggccaaaccctattcgatcgtcaccacgctcgtatatttattaatccggagggggaaaaattaatctcagtggctgatgagctgctttcaagaatgaaagacatcaatacattattttccgacagcgccagcgttcacaatttatttttgggttgtagtaaaaccattggcagctatattttgcctgcacttttaggtgagtttagaaatagctataactggttgcctaaaatagctattgaaaacactaacgatattctgagtaagttactcaaatttgaagtagatttggctattcttgagggaaatatcaataataaagatatcttgtctaccccatggttaacagatgaaatggtcgttatcgcaaccaaagatcaccctctcgcatacgaaaaatcagtcccgttctcagtattgagtcagcagtcatggatattgcgtgagcaaggttcgggtagccgcagttattttgaaaatcatctggcaccattgttattgcagccgaaggtcattttatctttggatactttcgattcaattttattttctgttcaacaaaatttgggaatcacctacgcttcccggcttatcatccaaaatcctttttttcacgaccatttctcagtaatcaaaacagaaacccgttttttccgctcgataagcctctgccaccatcgacaaaaatatctatctaatggtgctcaacagtggatcaattttctgattcatgcaggtaaacgacttgagtttgcacgaaataatcagatagagaattgattattagttatgtccaaaactggatataaaatagcaaaaaatattacctgtattctcaaaattcataggccagataagggatatcccatcttcggtaagtcagtaatattcgaattctttggaagatctcggtcaattagtttgtttataaaagcagcataattaataaatcagcaacaaaaaaatgaaccagtagtatctatggctaaattaataatcttaatcgatattaaatttatctttaagccaaaaagatcgtagaataatctatagagaaccaatggaaaaacctgtcaaaaaggcgtgtttcaaacgctgatttattgctctttattgcattaggattttaggtaaccaaataaaaaataatgtttttctccaagtattcctcccaatcaatctgtgtcagtctacaaatccgtaggcctaaaggcaattcgttcatttacggctactatttatggtcaggcagagtaagaaattaaataaacattttattggcttgagcctaatcatcctgcactactattaatcagtacggcagattatcactatgacagggcatgtcttggcgaaatgtatcttttcatacaggttgctgtatccaagatgcatatgaacttttcggggtatctctcatgttcgtagatcaagacacatcgatcctggacacttactttggcacccatagcccctattggcgcttggcttttgatagccaagccttggaactctccgccgtaaaaggcacgaccaatattgccgttcctcttgattcacttcaaacagcgaaagtccgcgcactgacagccattacttccagcctggaaatcagtatttctatctatggcaatccagttcatttgcatctggtaggacgaaaaattaatgacaaggaatggggaggaacagcttcagcatattcagatactgaagctgtcgcgcgcgatctggtgatgggattgtcctttgccgaacaagtcgtttccgaagctaactcggttattgtcattctggataaaaatggctccgtacaacgctttaatcgtttgagtgaagaatacactggcaaaaaagaacaagacgtcatcggtaagaatgtttttgaattatttatgacacagaaagaaggcgcatcctcgcgtaaaaacattgaaggtttttttaaaagaggtgcttcttatgaagtggaacgctgggttaacacggtaaaaggaaaacgcctgtttctttttcgtaataaattcgtgcacagcggcagcggtaaaaacgaactttatttaatctgctcaggtacagatattactaaagagagacgagcacaggaacgcctgcgtgtgctggcgaataccgatatgattaccggtttgcctaaccgccacgctattcatgagcgaatcaacagtgcgattcaaactcgcggagacgacgccgtagggattatttatcttgatctggataacttcaaaagagttaacgaccactatggccatatgtttggcgatcggctgctaaaagatgtgtcactttcgatattgagctgcttgaaagaagatgaaatgctcgcccgtttggggggagatgagtttatcgttcttattgaagatacgacgctttctgccctcgaaaatgccgcccaacgtattctcgaccaaatgcgagcccccttccgtatcggattgattgaagtttataccggatgttccattgggattgcgttatgcccacagcatggcgaaacgctggaaaatatcatccgcagcgcggataccgcgatgtacacggcaaaagaacttggcaaacggacttattctgtcttttctccggaaatgaataagaaagtgtctgaatacatttggctggataccaatctgcgtaaaggcctggaacaacatcagcttgtcgtattttatcagccaaaaatctcaactcgaaccggtaaagtcctcagcgtagaagcattagttcgctggcgatcaaccgagcggggtttagttccaccgcaagagtttatctcatatgcggaagaatccggtttgattgctcctttgggtcaatgggtattacaaacggctatgcagcaagccgttgactggcaaaagaaaggcatagatttaagaattgcagtcaatgtttcagcccgccagttggtgaatgaagcgattattaccagctttattaaatcgctggaaacctgtgaattgacctccagcttagttgatgtcgaattaacagaaagctgtctgattgatgatgaaaatgcagcgattaacattatcaaaaagctcaaagaattgggtgctgaagtccatctggatgattttggtaccggctattcttcactttcccagttagcacgtattcctattgatgcaattaaattagatcagagctttgtgcgcggaatagataaaaatcaggtcgcgcagtctttagttaaggcaatctccgttgtcgccgaaacgctccaaatgcgagttattgcagaaggcgttgaaacaatagaggaagagaatttcctagatttgttgagcatagatgaaaagcagggatttctttatgccaagccaatgcccgcagaagaactggagcattggctgagcaaacataccccgcactttccaagtaatttaacgggaaaaacctaacctaaatcgcttttggcatggtggatgtacgccgatcctgtagcatgaccaggcgttcaatataagccagatctttagcttcgatggagaaaacagagtccacccaatcttcggttatatccatcaattctgaacgcgtcagctgcaaaacgcgttggcgtgttcgtatcattgcgcgcataccgtttaattttggtcgaatagtatcaatgaaggtgcgagtagccatataagcatcccccggctgaaataatttatccaccaatccgcgactttcataccattctgccgcatgtgattccccgctccagataagctcctcggcaacacgcataccggcttttctagccaccagcgagtatcctcccatgcctgggaacagattaaaggctatttccggaaaccccattcgggcagtggtctgcgctaaaacaaagtgatgtgccagcgcagcttcaaaaccaccacctaaagcgctaccttcaatcatggcgattgagattgctccggtatcaaacccgcgggaggcggaatgaacgcaatccacgcaggctctagcgtaagccattaatgtttcacgcttgcggttttttatcatctgagcaaagaaacttaaatcacctccaacattaaacatatgtggaacaaccgaacctgtaacccagaagtcgataggcagttttgactcttttgctgcctgcgccagtgtcataatattttcaattaactcaaggttaaaacacggacgtggattcgctcgtaacagcatccacatggtatttcgctcttcttcataataagcagagacttgcgatagatgcccagcttcggtaaatgggcggcagcttgggagattaatcattttcatatattccatccaataagtgatttcaacacaggtaagcctctcggctaattcagcttgcttgaggtcgatttcccctcaaataaggcaagcaaataaatagtgagtcactggatgaaaaaagggaggatatatcgatatataaaagaataatggtcagttagatacgacatttaaatataaaaacacagttttaaaatccaccctcggaaattttgttggcattttctacatcgcaacaggctttaatcgaattagttttatacttctttggcttgtaaattaatctattcaatctaataaagcccaacattgaggttatttttatgtgaaagttataagacattatggatagaatgctgaaatattttcacttaacgttaaatgggctttgtatgctgcaaatactacattttcttttggctttgataatcatcacgctactggccttagccgcgagcaatgatcgcaagcagattcgcctacggtatattcttcaacttttagctattgaaattgcctttgcctactttttactgcattccgacattgggcttggcgcgattcaacacttcgctggtttctttgaaacgttgatgaaatttgccgcaattggtaccagcttcgtatttggtaatatgaacgaacaaggtctcgcgtttatatttctcaatgttttatgcccgattgtttttgtttcagctttaataggaatattgcaacatttccggatcttgccttgggtaattcgcggtataggtacggtgctttcaaaagtaaacggtatgggaaagcttgaatctttcaatgctgtgagcaccttggttctcggccaatcagaaaactttatcgtctataaaggcgtgattgccgatatttctcagcgccgtatgtatacgctcgccgctacggccatgtcgactgtttcgatgtcaatcgtcagcgcatatatgacaatgttagagccgaagtttgttgtggcagccttaatactcaacatgttcagcacattcattgttctttccattatcaacccttacccaacgggcgatgagcctgagataaaattaaataagctacatgatgatcaaagtttctttgagatgttaggggaatacatcctggctggatttaaaatcgccattatcatcgccgcaatgctgattggttttattgcgctaatcgccgctattaatgctttgtttaccagcatatttagcgttagcttccaggagattctcggctatgtattctacccccttgcctggctaataggtattccagcgccggatgcgctaaaggcaggcagtattatggcgaccaaattagtgtctaacgaattcgttgccatgatcgagcttaaaaaaatagcgattgatatgtccccgcgtggcctaggcattctatcggtgtttctggtctcttttgctaactttgcctcaatcggcattatcgccggcgcgattaaagggttgaatgaaaaacagggcaatgtggtttcccgtttcgggctgaagctagtttatggctctacattggttagtttattatcagcaacaatcgctggtttagtgctttgatgaaacggttggccttagagtgcaatgcctgaaggccagccatcattgaagattaaaaatcgacacagacgggcgcatcaatacgcattactgactcttgtgaaaactgcgccttgtacttatctctcagcaagttaaccgcgagatcactgtctttgctttcggcatgaatcagcatcagcgctttgctattttcttttgctactatcccgtcatgccccagccattgccctttggcttcaaacacggttaatccgtctttaaatttcggagtaacctctgagtcaacaaatgattgccactcagcgggagcaatcaccgggccttgcgggcgattcataccgaaataaagcgttgtttgcaccataggaacaccctgctgacaaacagagggaacagcctttatcgtagccgaattcgccgctgactcaggacgtataacgcatccgtttaaaataaaccccgaagcaattattcctagaataaagccggcacgccgacataagtaatttctgctgttatccatatagataggattctctttagaatagaaaatgacgctgcatgaaattagcatttagcggctaactgctgcaatggcgaaatcattacgccattacgccattacgccattacgccattacgccattacgccattacgccattacgccattacgccattacgccattacgccattacgccattacgccattacgccatgcagagtttaaataatctaactcacccatcaatagaaataataaccaaccactgtaatacatagcataaaaccccacatcggattaataaatctaatgcaaaacatacagggttagaaaatctcagtcgcgtttgaattgtgcggccattacccttgatcttttgccgcccccttgtgtgaaagactatgttacttagcgttctctatattattggtattaccgcagaagctatgaccggcgcgctagcagcaggccgtcgccaaatggacatgtttggcgtcattattatcgcctccgccacggcaattggcggtggttcagtcagggatatgttgttagggcattatccgctgggttgggtcaaaaatcctgaatacatcgttatcgttgctatcgccgcaatagtaaccacctgggtagcacctctgatgcgccatttacgtcaccttttcctggtacttgatgctatcggcctcatcgttttctcaattatcggagcacaaattgcgttagatatgggccatagctctatcattgccgctatcgctgcagtcattaccggtgtctttggtggcgtacttcgtgatatgctttgtaactgtattcccttagtttttcagaaagaaatctatgctggagtatcctttgccgcagcatggatttatatcgctctacagtacacgccgctttctcataattgggttgtcatcattacattggttactggcctgactgcccggctgcttgctttgcgttaccgtttaggattacccgtctttaaatatgagcatcaggatcattgattctctgtagctgctagcgctctataaattcaaacccctttatttgatggtgcgacaacgtagctacaagttgccgcacctccgaatcagcggcaaatgccattatttgttttacacgcttcttacctatattcgccaaagatagccattcttggttcgagcgccgtaataaatctgtccagcgttctggatagtcttcttttttagctagcttggggaaacccaacgccgccaaccactcgccaaacggccgctctcttgctacctgaaactgttgataaatcgtctttgctttcgccgctcctatacctggtacagcggcaatatcatccggtgtaaattcaagccattcaacgagattactcatcaagccatggtcgataaaggcctgccaaacacccgtactaatacctgccatattcagtcctgaacggctacttaaccaactcaaacgggcaataaattgctcattacaagaagcgggttgacggcgaaaacagcttaacgaatgaaataaagcggaatcgggggggttaacgacatgccgattctccactcgccagacaacgttatccaagcgagggataccttgccccgctaacgaaactgttatttgatcgccgggaatgacgtcccagtaccgccagcgttcaaccgatccaacattgacatttttcacccatttgtcatccagccgaataggctctagagataaaatagcgctgaccttccctgttcggcctatggtgaaattaactgatttcacctgcgtgacttgctgaaagggagagtatttccaggcaatagaccagtaaccgggctgtgattgccaatgatgccccgcaggttcttgctcttgccggataacaattccgtcggtcacaaatggcaacggtgattcaaaccagcgttgtcgccatgcaacaatatcactcgctgaagtgaccggcatactgaactctttagtcagcgaaaatcccatccgccgtaactcacgcagcttctcggtcataatcgcgggtccatcaggccatgcccaaatgaaaatacctatatcggacaacaatgccgaaggtgactttttcatcattgctcccgccaccaaagcccgggcattaataccgccagcttctttctgtttatggtgagttacctttaggaaaagttcgccgtgcaggaccagtaacggcggagcctgagaaataaagtggggaattgcaggtatatatttcactttatccgtccagttctggcctactgcaccgtcgcctcggctgatcgcttgcgtcaggtttccttgaacataggttaacgtgaccgcgacaccatcaactttaggctgaacccaaaggttttttcgttcggcgagccattcagataaagcccctttcccatggagtttttttaatcccgtatgagcaacgggatgagataatctattctgcaaactgatggtaggagaaagagcgttattaactcttttctcgggtattgctatgcatcgcacccagtgattgagccgatacctaagctgatcgtaaatatcatcttcaatcaggctattaccctgttgaaaataagcgacatcccattcttctagttgcttttccagtctggagatctctgtttcgaattcgctgagcgtccatgacgggcaatctaccgaagctgacgatctgccatagaaaatagaaaccaagagcatccccaatatgattaacttatccatgttctttccctcgccgtccttggtgaacatgagttaatccgctagcaacgaataattaaatagcccaaaagtgaaaatgcggcacatctcgaaaaatacttttttcgttactgcaacaacttgaaattgctgaatcccctacgcaaagtatgtaatttgagctttttaaatacgaaaccttgtagtgaaatgtgttgtaacgctgcatgacgcggttagcccgtgtatactgtgcgaagattcacacttctgctttttatacatcaaccctaatcaactgaaacgtcatcatggttcaaggcacgctatacattgtttccgctccaagtggggctggaaaatcaagcctgattcaggctttactgaaaacacagccgttgtacgacacgcaggtatccatttcgcatactacgcgtgcaaaacgtcccggtgaaaatcatggtgagcattactattttgtttccgaacaagagttttgccagatgattgaggatgatgccttccttgagcatgccaaagtttttgaaaactactacggcacctcacgtttggccatcgagcaaactctgtctaccggcgttgatgtctttttagatattgactggcaaggtgcacagcaaattcgtaaaaagatgccggcagcgcgcagtatatttattctgcctccttcaaaagacgagctggatcgtcgtttacgaggccgtgggcaggatagcgaagaggttattgccaaacgaatggcacaggccgtcgcagaaatggatcactacgcggaatacgattatttaatcgtaaatgatgatttcgatttggcattgtccgatttgaaaaccattattcgcgccgaacgactgcgtttagaccgccaaaaacagcggcatgacgctttaatcagcaaattattggcagactgaaccgagtttcagtatcatgcccagtcatttcttcacctgtggagtagcagaattatggcacgcgtaactgttcaagacgctgtagagaaaattggtaaccgttttgacctggtgttggtcgctgctcgtcgggcgcgccaaatccagtctggcggtaaagatgcactggttccagaagaaaacgataaagttaccgttatcgcactgcgtgaaatcgaagaaggcctgatcactaatcagatccttgatgttcgtgaacgccaagagcagcaagagcaagaagccgcagaaattcaagcggttactgccattgccgaaggtcgtcgttaattagtaattagactgtgagtctgccttgtacctgtttgaaagcctgaatctgctgattcaacgttacctgccagaggagcagattaagcgcctcaaacaggcatatcttgttgcgcgtgatgctcacgagggtcagacacgctccagcggtgagccttatattactcacccggttgccgtggcctgtatcctggcggaaatgcgactcgactacgaaaccctgatggcggcgttattgcatgacgtcatcgaagacacgcctgcgacatatcaagatatggagcaactgttcgggaaaagcgtagctgagttggtcgagggcgtatccaaactcgataaattaaccttccgcgacaagaaagaggcccaggcggaaaacttccgcaaaatgatcatggcgatggtgcaggatatccgcgtcattttgatcaaactggcagaccgcacgcacaatatgcgcactctgggttctttacgcccagataaacgccgccgcatagctcgtgaaaccctcgaaatttatagccctttagcccatcgtttgggtattcatcatttgaaaaccgagcttgaagagctgggttttgaagcgctatatcccaatcgctaccgcgtcatcaaagaagtggtaaaagccgctcgcggtaaccgtaaggaaatgattcaaaaaatcctgtcggagattgagggtaggttaaccgaagcgggtataccttgccgggtcagtggacgtgaaaaacacctctattcgatctattgcaagatgaatcttaaagagcaacgttttcactccattatggatatctatgcttttcgcgtcattgtgaaagaagtggatacctgttaccgggttttaggccaggctcatagcctgtacaagccgcgccccggcagagtaaaagactacattgccattcccaaagctaacggttatcaatcgttacatacctcattaattggccctcacggcgttcctgtcgaagtacaaattcgtactgaagatatggaccaaatggccgaaatgggtgttgccgcacactgggcttataaagaacagggcgaatccggcaccacggctcaaatccgcgcccagcgctggatgcagagcctgctggaattacagcaaagcgcgggcagctcatttgaatttatcgaaagcgtaaaatccgatctgttccccgatgaaatttacgttttcaccccagaaggtcgcatcgtcgaactaccggcgggcgcaacgccggtagacttcgcctacgcggtacacaccgacattggccatgcctgcgtcggtgcccgtgtagaccgccagccttaccctctttcgcaggcgcttagcagcggccaaaccgttgagattattaccgctccgggagcccgccctaacgctgcatggctgaattttgttgtgagttcaaaagccagggccaaaattcgtcagttgctgaaaaacctgaaacgcgatgagtccgttagccttggccgacgtttactgaatcacgctttgggcaatggccgtaagttggcagatatttctccggaaaatatccagcacgaactggatcgcatgaaactggcatcggtagacgatctgctggctgaaatcggtttaggcaatgccatgagcgtagtggttgcgaaaaatctactgggtgaccctgctaatatcgccgcgtcaggcaccagaaaactgccaattaaaggcgctgatggtgtgttgattaccttcgctaagtgttgcagacctattccgggcgacccgatcattgcgcatattagcccaggcaaaggcttggtgattcaccatgaatcctgtcggaatatccgtggctatcagaaagagccagagaaattcatggcggttgaatgggataaagtcaccgagcaagaatttattgccgaaattaaagtcgacatgttcaatcagcaaggcgctctggctaacctaactgcggctattaatgcggctgaatcaaacattcagagtatgaataccgaagagaaagatggccgaatctacagcgcctttattcgcctgacaacgcgagatcgtatccatttggcgaatattatgcgtaaaattcgtatcatgccggacgtagtcaaagtcagccgtaaccgcaattaaggcctatgaatccccaacgctatgcgcggatttgtgaaatgcttgccaccagacagccggatttaaccgtctgtctggagcaagtacataaaccccacaatgtttccgcaatcattcgtaccgctgatgccgtaggcattcatcaaatccatgcaatttggcccaccgcagaaatgaataccctgctgtctgctgccgctggcagcaatagttgggttcaggttaaaacacatcccgaaattagcggtgcggtccaacatttcaaaacccagggtatgcagattctggcgacacatctttctgataacgccgttgatttcagagaaattgattacactcgcccaacctgtattctgatggggcaggaaaaaaccggtatttcaaaagaggccttagcgctggccgatcgcgatatcattattccgatgatcgggatggtgcaatctctaaacgtttccgttgcctctgcgttgattctgtacgaagctcagcgacagcggcaaaatgccggaatgtatcagcgtgcagctagcgtgttggataaagatgagcagcaacggctgctgttcgaaggcggttatccggttttggcacaggttgccaaacgcaagggtctgcctcctcctcatatcgatgagcatggccagattattgccgagccgcaatggtggtctgctatgcaagcaacggagtcgtaaatgaaaggccacctgctcgatgccgttcccctgagtacactctccggcgttggcgcaagtcaggctggcaagttggcgaaaatggggctggaaaccattcaggatctgttgctccatctacctctgcgttacgaagaccgcacccgcctttatcgtatcggtgacctgctacctggcatttttgcaaccgtggaaggcgaagtgctgcgctctgatattagctttggccgccgtcgaatgctgacctgtcagataagcgacggcagcggtattcttaccctacgcttcttcaattttaacgctgcgatgaaaaacagcctgtcccccggcaagcatgttatcgcctatggagaagctaagcgcggcaaccacgggccggaaatcattcatccggaatatcgagtacatggagaaaatacgggtattgaattacaagagtctctgactccagtttatcccacgactgaaggtattcgtcaggcaacgctgcgtaagctcatcgatcaggcactagccttacttgatatcagcgctatcgcagagttactgccgcaggaactcagccgcacgcttatcagtttgccagatgctattcataccctgcatcgcccaccagcagatattcagttaaccgatctggagcaagggaaacatccggcacagcgccgattaatattggaagaactgctggctcataatctcagtatgctggctgtacgggcgggagcacaaagctacaaggctttgccgttgctcgctgaagaacagctaaaacaacgttttctggctaatctcccctttaaaccaacctctgctcaacaaagggttgtgggtgaaattgaacaagatctgactaaccctttccccatgatgcgattgattcagggtgacgtgggctcgggtaaaacactggttgccgctctggcggcgctgcgggctatcgctcatggcaagcaggtcgcgctgatggcaccgacggaattattagcagaacagcacgcaaataccttccgtcagtggttcgaaccactggggctggaagtcggctggctggctggtaaacagaaaggcaaggcgcggctggcacagcaggaagccgttgccagtggacgggtttccatggtggtgggtactcacgctatctttcaggaacaggtgcagttctcagggctggcgctggttattattgatgaacaacatcggtttggtgttcatcagcgtttggcgttatgggaaaaaggcgaggaacaaggtttccatcctcatcagttgattatgaccgccaccccaattcctcgcacattggcgatgaccgcatatgctgatttagatacttcggttattgatgaattacctccgggaagaacgccggtcactaccgttgccattccggatacccggcgcagcgatattattgccagggtgaaaaacgcctgtctggaagaaggccgtcaggcttattgggtctgcacgttgattgaagaatcagaattactggaagcgcaagcagcggaagtgacctgcgaggagttgaaagcagccctgccggagataaaagtcggtttagtacatggccgaatgaaagccgcggaaaaacaatcggttatgcaatcattcaaacaaggggaattgcagctgctggttgcaaccacggtgattgaagtgggtgtcgatgtccctaacgccagcctgatgattattgataacccggagcgcctcggtttagctcagttgcaccagctgcgtggtcgggtcgggcgcggtgcagtggcctctcactgtgtgctgctgtataaaactccgctcagtaaaacggctcaaatgcgcttgcaggttttacgagacagtaacgatgggtttgttattgcgcagaaagacttggaaatacgcggccccggcgaattattaggtacgcggcaaaccggtagtgcagagttcaaagttgctgatttaatgagagatcaggctatgttgcctgaggttcagcgcattgcccgtcaccttcaacagcaatatcctgaaagtgcaaaagcgctgattgaacgttggctgccagagcgatctcgctacaccaacgcttaaatattataagggaaagccattgcggctttccctttaaacaccgactttagcccgcaactgctgggaatattggcagcaacagataaagttttatcacaatcgcattgacgatatcgatgaagaaagcaccaaccattggcacaaccaagaatgccaaatgagaagggccgaaacgatcggtaatcgcctgcatattagcgattgccgtcggcgtcgcgcctaagccgaaaccacagtgacccgcagccaacacagccgcatcatagtttttacccatcactcggtaagtcacaaagattgcgtatagcgccatcgccaacgcctgaaccaccagaataaccagcattggtaaagccagggaagccagctcccaaagtttgaggctcatcagcgccattgccaaaaacagcgacaaactgacgttacccagcacggaaaccgcacggtcaaacaccttgtaaaagccaaccatagccagaccgttgctaaggatcacgccaacaaacagcacgcaaacaaaggtcggtaattcaaacattgtgccctgtagcaaggctgcaatgtgatgccctgccatcaaacaaatggcaatcatcgcaatggtttcgaccatcaccaacggcgtaatcagacggccagtagatggtttttcaaatgcagatggcagctcgctatcttccggttttccatccggcgtagaagaatgcttcaccagataacgggccacagggccgccgatcaatccacctaaaaccaggccgaatgtggcacaagccattgctacttcggtagcattttcaaaaccataacgctcgacgaacagtttactccacgccgcaccggttccgtgaccaccggaaagcgtgatagaacccgccaataggcccatcaaaggatctagccccatcagcttcgctaacgcgataccgatggcgttctgcattaatagcaggccgactaccacaaaaacgaatacgcttaacgctttcccgccggcacgcaggctggccagattcgcgttcaagcctatggtggcaaagaaagtcagcattagcggatctttgagggacatatcaaagctgatttcccagccaagagttttttgcaccagcaataacagcagagctaccagcaaaccaccggcaacaggttcgggaattgtatatttagttaggaagggaaccgattgtacgagtttacgccctagtaacagaaccagtgtggccgctacgagcgtgccataggtatcgagatgaaacatcctggtactccatgtaattaaaatatctaataaaaatatgacgttagccgaatccttaaaaaacgccaaagcaggttagggtggattagaaaaaaaaacgctgagaattacaagtttggtgagataaaaatgcgagcaggcaacaaatgcgtattttgaaaaaatcgaagcgcaaccgattgcttttgtgaagcggatcattaaaatgccccctttgccgattctggaatgccaacccatgaccacgcaatccgccgagctaaagacctcacggccggcctctcatactaatgcacccagcgaactgatttaccgattggaagatcgtccaccgttgccacaaaccctatttgccgcttgtcagcatttattagccatgtttgtggcggtgatcactcccgcgctgcttatctgccaggctttaggtttaccggcgcaggatacccagcgaattattagtatgtccctatttgcgtcaggactcgcctctattttacaaataaaaacctggggacccgtgggttctggtctgttatcgattcagggcaccagtttcaactttgtttctccgctgattatgggcgggctggcgttgaaaaatggcggtgccgatatcccgaccatgatggccgcgctgtttggtacgctaatggtcgcgtcttgcaccgagatcctgctatctcgcgttttgcatttggctcgtcgcattattacgccgttggtttccggcattgtcgtgatgattatcggcctatcgctgattcaggttggcctgacatccattggtggcggatatggcgcgatgagcgatcatacctttggctcaccgaaaaacttattactcgccggcgcggtgttggtcgttattatcctgctaaaccgtcagcgcaatccgtacctgcgcgttgcttcattagtcatagcaatggccgttggctatctgttggcttgggctatggatatgctgccagccagccaacctgctgccgaaacggctctaataaccattccaacgccgttttattacggtttatcctttgactggaacctattgattccgctgatgctgatctttatggtgacttcactggaaacaatcggtgatatcactgccacttctgacgtttccgaacaaccggtcagcggcccgctatatatgaagcgtttgaaaggcggcgtattggcgaacggtttgaattcaatggtttcagccatcttcaataccttcccaaattcatgcttcggtcagaataacggcgttattcagctcaccggcgtagccagccgttacgtggggtttgtcgttgctctgatgctgattctgttgggcctgttccctgcggtagccggttttgtacagcatatccctgagccagtattaggcggcgcgaccatcgtcatgttcggcactattgccgcatccggcgtacgcattgtctctcgcgaaaccctaaatcgtcgggcgattatgattatggctctttcattggcggtaggtatgggcgtggctcagcaaccgctgattctacagtttgctcctgattggattaaaaccttgctgtcttcgggcattgccgccggtggcatcaccgctatcgtgctgaatctgatcttcccgcaggaaaagtagcttccctggaagtgacccccataaataaatccaaatggtcgatgctattgcagcattgaccattttttattcctgattaaaggattgtctattgaggtcagggtcgaattgcggcataaacggagataacttcacgccaacagactgagatttaccagatgaaaactatcggaaaagtactcctgacgctgttactgctcctgatgttgctggtagccatcgcttatttactgttgcaaaccagttggggagctaaaaacctcagccgctgggtgagcgatagcagccaatatcagctatctctgggtaaaatcgatcacgattggtctcagccggggcagattaccttcagcgatgtcatgatttcgcaaaccaacaagcccgtctttcttaacgctgggcaggttgtttttgggctcagctggcgtcaaattaccgagccacgacacttccgcagcctactgttacaacagggcagcctaaatctggacgcgccttccccagcgttaaatattcaggccgatacgctacggctggcaaatatggcgctaaataccgcttcgcccggttcaagcattcaaggtaagaatatcactggcggtattattccgtggcaacccaaagctggcgatcgcttgggtgagaacaaccaatttcagcttagcgccgatgagctaaccatcggtgggaatgctttcgaaaatgtctttgtacaaggtacaaaaaacaaacaggcgcttaaactcactaacttcggtgccaatatcgcccaaggggaactgaccggtgaagcgagtcgcgagcaggatggccgctggcaggtagagcatttgcgtctcagtaatgtgcgcctgcaaaccgcgaagacgctggacgatctgtggcatagctatacgcaactgccgccggtcacggttaaacgtttcgatttgatcgatgcgcgagtcgaaggcaataactgggcgtttaacgatttggatctcacgctaaagaatgtggcgtttgaaaaaggtgattggcgtagcgccgacggcgagctagcgcttaatgcgggggatattatcaagggtgatatccatctgatcgaccctatgctgacgctggaactttccgataacggtgcggcgattaaacaattttctacccgctggcaaaacgggctgatccgagctaccggtaactggaaccgagccaatcatcagttacagcttaatgagctggcgattgtttctctagaatatacgttgccggaaaactggcggcagctctggcaaaagccactaccgagctggctagcagcagtacagatcaataagctatccgccagccgtaacctgctgattgatatcaatcctgatttcccattccagctcaccgcgctggacggttttggcagcgatctggtactggcaaaaaatagccagtggggagtttggtctggttcactaacgcttaatgcaggtaatgctaccttcaaccgcaatgatttgcgccgcccatcattggctctcaccgctaatgatcagcgaataaccttcagcgatctcagcgcattcacaccggaaggcttactggaagcccaagctgaaatcgggcaatccgcagagcgcccattctctctaacgctgacggggcgttcggtggatgtaaatttcttgcacaattgggggtggccaaaactgccgttcgaaggcaaaggaaatctgaatgtgcagctaaaaggcagtctggctcagagcattccctttaaaagctcgctgaacggctctttaaaggcgatagagaacggcgggcaacaagttgaccaactgatgcaggctggcgaagtgaacggcgtgacaacgccctgaggcaatataattcgggttctaactgctattctaacaactaaccgacgtcgcacgaggttgtagccgtgatctgctgcaacctcgcgcaagaggggataagcggcggttaacctgcttcggcgtcccctggcgttaccggcaacaccatataagtgcctgaaaatacggctccagcattttcatcaccaaataaattcacttccaattgcacccgcgccctacgtccacgcgccaaacgatccagatcgccactgatcgagcctaaatcggcaatggctcttggccgtccggtcactggcgcgctgtagcgaatatgggcatcggccagaataatggtaccgccgagctggcgttcacgcagtaacagccagatcaaaccccatccagtcagcgttgccagtgaaaataaactaccggcgaacagcgtatggtggggattttgattgccagcctcgggcatggtcgtcacaaaacgctgcccggtgtattggctgatacgcacgcccattttctcactgagcggaatatggtcgtaccaagcctgctgtagctgaccacaccagtctgggcgatgcaggatatcatccatggtcgccaccggcttaatcatcaaaaagtgacgtaccggcgtggtttgcggcgcggtaatttctccctgactgacaaaccccagcttgccgaagaactccaccgcatcttcacgggcgctacacactacccgcttaaccccttcctgacgcgctacggattccagcgtcatcgccaccagcgtgcctaatcctttgccctgtacagccggatccactgctaaaaaccgaatagcagcctcattatcagcattgatatataaacgaccaacggcaacgggtttcccctgctcgtccaccaccatttggtgatgcgccattgcatcataggcatccttttcggagccaacaggttgatgcagtggtttgcgtaacatttcccaacggaattgataataatctttaagttcttgttctgttatgggtacgcgtaggtgatacatagaagctatctctcttagaaatccatcaacaaaatgtattccgctaccctcagtaataacagagccagaatatccccaccctaaacctgtagccagaaagtcaccgggccgtcattgaccagactgactttcatgtccgcagcaaattgtcctgtttcagtttttacaccacgctcgcgacactgagcaacaaaatactgataaagcctgtcggcttcttctggaaccgcaccgcgcgaaaaactcggcctcatgcctttttgggtatccgccaccagcgtgaattgggaaaccaccagcaggctaccgccagcttgctgaacgttgagattcatcttgtcgttttcgtcactaaagatacggtagcccaacactcgttcacacaaacgctgcgctttttgttcggtatctccttgctcaacgcccagtaacaccaataatcccgagccaatcgtgccaacggtaacgccatccacatccacgctggcgctttgcgctcgttgaatcaaagcaatcataacaacctacatctcctgattttgcgtttcgtcacccggttcctgctttcgtaatgatcgatgctcacctaatgttacggtgatttctgctcccaacaatacgatgcaccagctccagtaaacccataaaaataaaatgggtatgaccgccaagacaccataaattaactgataggaaggaaatagcgtgatatacagcgtaaatcccttctttcctaattcgaacaaaactgccgccaccagcgcgccaaccagcgcatctttgaccggcaccggtaccgttggcaccacgctgtacagtaaccagaatgaaatccaggacagtattaacggaaagattcgtaatacctgatcgataaaactattcactccggtggttgccagccagttcaatgaaagtaaatacgaactgatcgccatactggcaccgaccaaaatcggccccagcgtcaacaccatccaatacactgcgaaggaaaagacgatagaacgcttattcttgctgcgccaaatggtattcagcacgctatccaccgagtaaatcagcaacagcgcggtgacaatcaggccacaggtacccacggccgtcatgcggttagagttggcgacaaaccgctcaatatagttttggataacattgccagcagatggcataaagttagcaaaaacgaaattcttcagttgaatactgatatccgaaaacatcggaaatgcggcaaacagcgcaaaaatcaccgtaatcaacgggactaaagacagtaatgagacataggctagatgtccagccagcatagttaagccatcgtgatctatgcgtctgaagagcattcgcccaaagctggcgctgggttttaacggcgacggtaaacgaaagcgcggaaatcctgccatattcacctcgaggtcaaaaatgggattgagagcgaagagtgagtcagaaaagggttaaccctaatgcgttaacccgtgatctcattaggaaaaataggctggaataacggttttgtcagttacatgaaccgcattaatacccaaggcctccgccgcttcgatatttgcagccacatcgtcaaagaacaccgcctgctccggagggtagttttcattatttaaaacatggtgataaatatcggcatccggtttacgcatccctaaatcctgcgacaaatacatatagtctgccgctgcagcgacctcaggataatgttgcggccaataattgcaatgcaaacggttggtattagagagcaccacaactctgtgaccttgctcgcgcagctttttcattatctcaataacttcagggcgcaaaccaacaaaaatcgcctgccaaccggtggcaaactgttcaaaactcagggaaagccccatttcgtcactaaagcggcgcgcaaaatcttcgtcgctgatttcacctcgctcatgctgctgaaaaatatcacccatggtgaaacgttcggtcaaagttgccaggggcacactgctcagtttgctccagacacccaaaacgcgtttgaagtcgatatcaacaatcacattccccagatcaaagatatacagcatagcgctctcccaaatttgaaggtgagttcactgtaacggtaaaaaagaaggctgaacagacggaggaagaaaaaggaaaggatagaattgaatatacggtggggtataaaaagaactcagggcgccaattgcgccctaagtgtctgttatagcttaaaaaggattaaccttctttgctaccacggccagcacgcttacgatcgttttccgtcagatgacgcttacggatacggatagattgcggggttacttcaaccagttcgtcgtcatcgatgaactccagcgcttgctccagggttttcttgaggaaaggaaccagagtggttgcttcatcagtaccggaggcacgcatgttggtcaattgcttaccagtcaggcagtttacagtcaggtcgttagagcgtgagtgaataccgatgatctggccttcatacacttcggtgccgtgaccgatgaacagcttgccgcgatcctgcaatttgtacagtgcgaacgcaacagctttaccctgaccgttagagatcagtacgccgttctgacgttgaccgatttcgcctggacgcacatcatcgtagtgactgaatgtggagtacagcagaccagtaccagaagtcatggtcatgaattcagtacggaaaccgatcaggccgcggctagggatggagtaatccaaacggatacgccccttgccatctggaaccatgtctttcacgtcgcctttacgctcacccatggcttgcattactgcgccctggtgttgctcttcgatatccagcgttacgttttcgaatggttcttggttacgaccgtcaatcatacggttgataactttaggacgagatacagccagctcgaaaccttcacgacgcatgttctcgatcagaaccgacaggtgaagttcaccacggcctgaaacgcggaatgcatcagcatcttcagtttcttcaacacgcagcgccacgttgtggatcaattctttgttcagacggtcaagaatctgacgtgatgtcacatacttaccttctttaccacagaatggagaggtgttaacgcagaagtacatggttacggttggttcatcaacagacagtgctggcaatgcttcaacagcattcacatcacaaatagtgtcagagatgttcaactcgcccaggccggtaatcgcgatgatgtcaccggcttctgccagattggtctcgatacgctccaggcccatgtggcccaatactttaccgactttaccgttgcgagttttaccttcgctatcgataatggtcacttgctggttaggcttaacaacgccacgtttgatacggccgataccgataacaccaacgtagttgttgtagtccagctgggagatttgcatctgcagtggaccgtcacggtcaacttttggcgcaggtacatgatcaacgatagcttggtacagcggggtcatgtcttccgccatatcgttgtggtcttcaccagcaatacccatcaatgcagatgcatagatgatagggaagtccagctgctcgtcagtcgcatccaggtttacgaacaggtcgaatacctgatccacaacccagtcaggacgcgcgcccggacggtcaactttgttgataaccacgattggtttcagaccatgagcaaaggctttcttggtcacgaaacgggtctgcggcatcgggccatccattgcgtcgacgaccagcagcacggagtcaaccattgacatcacacgctcaacctcaccaccgaaatcggcgtgtcctggggtatccacgatgttgatgcggtagtctttccaattaatggcagtattttttgcgaggatggttataccacgctctttctccaagtcattggagtccattacacgttcggttgcttcagtacgttcgccgaaagtaccggattgttgcagcaacttatcgaccagggtagttttcccatggtcaacgtgcgcaataatggcgatgttacgcagattctcgatcacagcttttttgcctcaggcatttagaaatagcgcgctattgtacacgtaataagcgagggactaaacaagatcacaaccatctcttataaacaacctgacatcggttagattgtgatcctattcacggtgcaaaaatcgcctttcggcgcactcttgcaccaatatggtgcccaatggcgcataggaagcaccaaaatagtgcaatataactatcctggtgcatactgaatatcagcagacccccatgatatggcataaatgggtggtttgaaaagttggcacagttttcgcaatactctttttaagctaaaaaagtctttttccagacaaaaatggcagctagccacaacctcagtacataacggtaatcgttccacgacgacgactatgacaaatccgggagatataagtatgtccgctgaacatgttttgacgatgatccatgagcacgaagtgaaatttattgatttacgtttcaccgataccaaagggaaagagcagcatgtcaccatcccggctcatcaagtcaacgctgacttctttgaagaaggcaaaatgtttgatggctcctcgattggcggctggaaaggcattaacgaatccgacatggtattgatgccggatgccagcaccgcagtaatggacccgttcttcgctgattctaccctgattatccgttgtgacattctggaaccaggtaccatgcagggttatgaccgcgatccgcgctctatctctaaacgtgctgaagacttcctaaaatcttccggtctggctgacaccgtactgttcgggccagagccagagttcttcctgtttgatgacgtgcgttttggcaacgacatctctggcgcttactatcatatcgatgatatcgaagcggcgtggaactctggtaccaaatacgaaggcggtaacaaagctcaccgtcccggcgtgaaaggcggctacttcccggtgccaccggtcgattccgctcaggatctgcgttctaccatgtgcctgaccatggaggaaatgggtctggtggttgaagctcatcaccacgaagtggcaaccgctggtcagaacgaagtggcaacccgcttcaataccatgaccaagaaagctgacgaaatccagatttacaaatacgtggtgcacaacgtggctcacgcatttggcaaaaccgcgacctttatgcctaaaccactggttggcgataacggttctggtatgcactgccatatgtcactggcgaaaaacgggactaacctgtttgctggcgacaaatacggcggcctgtctgaaatggcgctgttctacatcggcggtatcatcaaacacgctaaagcaatcaacgccttcgctaacccaaccaccaactcttacaagcgtttggttccgggctatgaagctccggttatgctggcctactctgcccgtaaccgttctgcgtcaatccgtattccagtgattgccagcccgaaaggtcgtcgtattgaagttcgcttcccagatcctgcggctaacccgtatctggcgtttgctgcccagttgatggctggtttggacggcattatcaacaaaattcatcctggcgatgctatggataaaaatctttacgacctgccgccagaagaagcgaaagagatcccaaccgttgccggttctctggacgaagcactggctgcactggatgcagaccgcgagttcctgacccgtggtggtgtattcactgatgattccatcgatgcttatattgcattgaaacaggaagaaatggatcgtgtgcgcatgactccacacccagttgagttcgaactgtattacagcgtctaattttaagtagcctttttttgttgccgtggaaacttttagcccatcttcggatgggcttttttctccactttatctttctttaatagtaacctgactcggcaattacgctgatttttcaggataaatgcactgaaccggtgttggagtctgctatatggcaacaggcacgctgcccgatgctgggcagatactcaattctctcattaacagcattctgctgttagatgatgacctggctattcactacgccaatcccgcagctcaacaactgctggcgcaaagctcccgtaaactttttggtacacctctgccagatttattaggctatttttcgctcaacattccgctaatgcgggaaagtctgatctcagggcaaggttttaccgataatgaagtgacgctggtagtcgatgggcgagcacatattttatcgctgacggcacaatcgctacccgaaggttttattctgctggaaatggcgccgatggataatcagcgccgcctcagtcaggagcaactccagcacgctcagcaggtggcagcgcgagatctggtacgaggattagcccacgagattaaaaacccgctcggtggcttacgcggcgcagcacagctattggcgaaggctctacctgacccatcgctactggaatacaccaaagtgattatcgaacaagccgatcgtctgcgtaatctggtggatcgcctgcttggccctcaacgtcccggtcagcatatcaaccaaagtattcatcaggttgctgaacgggtttgccagttggtatcactggaaaaaccgaataatgtcaccctgattcgtgattacgatcccagcctgccggaattggctcacgatccggatcaaattgaacaggtattactgaatatcacccgcaacgccttacaggccttgggtgaaaaaggcggcaatatcactctgcgtacccgcacggcgtttcagataacgcttcacggcgttcgctaccgtctggccgctcgaattgatatagaagataacggccccggtgtacccgcgcagcttcaggatactctgttctatcctatggtcagcggccgcgagggaggaactggcctcggcctgtccatagcacgcagccttatcgatcagcattcgggtaagattgaatttaacagttggccgggacacaccgaattttcggtttacctgcctattcgccagtgaggtttccatgcaacgagggatagtctggatcgtcgatgacgatagctccatccgctgggtgcttgaacgcgcactgactggagcaggtttaaactgtgtcagtttcgacaacggccatgccgtgttggatgcattggctacacaaactccggatgtgttgttatcagatattcgtatgccaggaatggacggtttagcgctgctcaagcagattaaacagcgccacccgatgctcccggtcatcataatgacagcgcattccgatttggatgcggcggtcagcgcctatcaacaaggtgctttcgattatctgccaaaacctttcgatattgatgaggctgtcgcgctggttgaacgcgctatcagccattatcaggagcagcaacaaccgccgcgcagccaacctgccagtgggccgacgactgatattatcggtgaggcaccggcaatgcaggacgtattccgcattattggccgcctttcccgctcatccattagcgttttgattaatggtgagtctggaaccggcaaggaattagtcgctcatgctctccatcgccatagcccacgggcaaaagcgccgtttatcgccttaaatatggcggcaattccgaaggatttgattgaatccgagctatttggtcacgaaaaaggcgcttttaccggcgcaaatcaggtgcgtcagggacgatttgaacaggccgacggcggcaccttatttctggatgaaatcggcgatatgccgatggacgtacaaactcgcctactgcgagtgctagctgacggccagttctatcgggttggcggatatgcgccagtgaaagtagatgtgcgtattattgcagctactcaccaaaatctggagttgcgggttcaggaagggaaattccgcgatgatttattccatcgcttaaacgtgattcgggttcatttaccgccgctgcgagaacgtcgggaggatattcctcgtctggcgcgctatttcttacaagttgcagccaaagaattgggcgtggaagccaaaaatcttcatccggatacagaaacggccctgactcgtttaccctggccgggtaacgtccgtcagttggaaaatacctgtcgttggctaacggtgatggcagctggacaggaagtactgattcaggatttgccgggagagctgtttgaaaccgtctcgccaaatgccgaagaccagaaacagcaggatagctgggccacactactggctcaatgggcagacagagctttgcgttctggtcatcaagatttgttatcggaagcacagccagaaatggagcgcactttgctcaccaccgctttgcgccatactcaaggacataagcaagaagccgcacggttactgggctggggacgtaacactctaaccagaaagctaaaagaattgggaatggaatagtcgagaaataacgccctcagtcgcagctatagctctgagggcgattaatcatcagataacgcgggagaattgctgtttacgtgcctgttttcgcaaataaatatcaaaacacatacagatattgcgaatcagtaaacgacctcgagatgtcacccgaatgcccgtttcgtctcgctccaccagcccatcgtcttcaaactgcgccagcaaagccaaatcttcggcaaagtaatcagcaaaacgaataccatactgttgctcaatcggtgcgtaattcagctggaaatgacaaattagcgttttaatcacgtcacgacgaatgcagtcatcctcggtcatcgccagcccgcgccacaacgcatttcctcgttcctcaacctttgcgtaataggttttcagatctttttcattttgcgcgtagctatcgcccaacatgctaatcgccgaaacgcccagccccagcagatcactttcaccttgcgtggtataaccctggaaatttcgatgtaatgtcccttcccgctgcgccaccgccagttcatcatccggacgagcaaagtgatccataccaataaattgatatcctgaatctgtcaggaaactgatcgtgtgctgcaaaatgtccagacgctgttccgggctaggcaaatcttcatctttgatttttcgctgagccgcgaacaatgaaggcaaatgagcgtaattgaacacgctcaagcgatctgggccaagctctgctacccgttttagcgtgaaagcaaaactttctggcgtctgcttcggtaaaccatagatcaaatcaatattggtcgatttgaatcccaccgctttagcgcgagcaatcagcgcaaagataaagtcttcgtcctgttcacggttgaccaatcgctgaacttctttattgaaatcctgcacccccatgctcaggcggttaaagccttcggcacgcaggtgatcgataacgtctagctcaatttcacgcgggtcgacttcaatggattgttccgcttcgggtaaaaaatcaaaattatcccgtagcaaattcattaactgcgtgatttgtgtgttattcagataggttggcgtcccgccgccccagtgcatctgactgacctgacgccctttgaataagcttgcgcgctgacgaatttctttttccagtaccgccagatattcatcagccttatgctgctggcgagtaaccagcttattacagccgcaaaagtagcaaagcttatgacaaaacgggatgtggacatacagcgaaagcggtcgctcagggtaacggccaaccgcccgttcataagccgcatcatcataagattcgctaaactcaagggcggtgggatatgaggtataacgtggacctgaatagttatatttttgaattagggccagatcccaaacaacagcgttctcagacattgttcattccttccgatatttttttctaccgggccggttaaaaggcgattgtttacgttgtctggccgcggaagcgctgcgcaggcgggatttccgctgcgacagccgccatagtttacccaataaccacactagataacatgtaagtagtagggttatcgtcgggatcacccaattcatagcttagaatgcgtctttattaccgcgtttcagtaactgtaagatatcttcctgcttctcttcaggcttttcatcatcttcgtcatcaccaagttcaatacccagctgttccatcaatgcgtcgatgcgatccaacgtcagatcgacataagcctgatcttctttgctcaatacttcgtcattatccagacgatccagtaatgcatccaggcgttcgtcattttccagcttagccagctcttcttccggtgtcagacgtggtttggctacaggcttaggcgcagcaggcttagctttaactttgccttcaaccaccagcggtacaggcactttactgccgatacgcggatctttttcctgaacctgagtctggcctttcttgttgttggcctctacgttggttctcgcacctgagcgattaccgctgtgtcttttctgacgtttacgttcgcgagcttcaagatcaagctctacgcgtgtctttttattacgctttggtgttgcggttttgccgcgcggtgctttcgttggctggttcataacctgtgctcttaaattaggtaaataaatataggattggatttagtataggattgcggcggaatctagcagaaagcagacaaagaaaaaaggcggcaggttgccctgtcgccttttttcgcaccttctgcggaaggatatccttacagcgcaatccgtgcgcttatccaacttccctgtttatcccttgactacacgacactccatgtcggtctgtccgtaaaatttaccgctccttgcagccttcctttgctccgcccgatcctggcatttactcgttcttccttgccgacttgaaagtcaccatcctgactcatccgtgggtcatcgtccttaatctctgctgattcctttcgattccctgagacaacaacccatcccgagtcgctgataatttccttttggtacatcccagtaccggcgataactttactagcccgttgtttttactcaagacacttacaccaatgcggactggttcaattatcaccgtattgataatagattgtttttaaagcaagatttcttaacaatacttaaaaaataagacatcgccgcagcaaaaaatgggcaatcgcttacaaaacatcaagttccagagccatttttctcgcatactgagttaatcgagataaaccccccgctttcccgccgatgtagttataatccccccatgttagctatctcttacggagacgaaaaattttgaccattaaaaactataactatcatatgacccatttcgtcatcagtgctccggatattcgccatcttccgcgcgacgaaggcattgaggtcgcatttgcgggccgttccaatgcgggtaagtccagcgcgcttaacacattgaccaaccaaaaaagtctggcacgtaccagtaaaacgccgggacgtactcagttgatcaacctgtttgaagtgaccgatggtatccgtctggtggatttaccgggttacggttacgcagaagtacctgaagaaatgaaaatcaaatggcagcgcgcgctgggtgaatatttacagaagcgtaactgcctgaaagggctggttgtgttgatggatattcgccatccattgaaagatctggatcagcaaatgattacctgggccgttgctgtaggtacgccagtgatgctgttactgaccaaagccgataaattggcttccggtgcgcgtaaagcccagttgaatatggttcgcgaagccattattcctttcatgggtgatattcaggtcgaagcgttctcttcactgaaaaaaattggcgttgataaactgcgggaaaaactggacacctggttcagcgaaattccgccggaagtgatggaagaactggaagacgacggcgagtaagcaagattccgcactgtgattaaccggtttatctcttaatcctccactctacgggcggcagcctctggttgttgcccggtattgcttcccagacttaaccccgcgtccctgtttcttccccaaattgcattctaacgctgaataaatcggccaatggccggattgcgcccataaaaaacgccccagtcaataaatgactggggcggctaaaatattcagccaaatccgattacgtgaagtaaaaggtctgaaagatagaacatcttacctctgtaccctacatctgtaactctacatcattttttcgcagggcaaaagaattttttgttgtatagttacacaaattggcacgattcagcggtgaggaaccgagcataatcggcacctaatgtagcttaattacataaaacgctttaataatcgccacttagtgagcctgatcccaattcttacccacgccgacatcaaccttcaacggcacgtccaattccatgctctgttccatcagatcgcgaatcttctgagtggcactttccagcacgctttcatgcacttcaaacaccaactcatcgtgtacctgcatgatcacacgaactagaggctcttcctgctgttgtaaccagttatctactgcaatcattgctcgcttaataatatcggcagcggtgccttgcataggcgcattaatcgcttcacgctccgcagctttacgacgagtggcattacgggagttaatatcgggcaggtacaagcggcgcccatccagagtggtcacataaccttgctcggccgcttgtttacgcgttctttccatatattccagcacccccggataacgctcaaaatacagatccatgtaacgttgagcttccccacgcggaatattcagctgacgcgccaaaccaaaggcgctcataccgtaaatcaaaccaaagttaatcgccttcgcgctacggcgctgctctgaggttacattttccagcgccacgccaaagacttctgccgccgttgcccggtgaatatctttacccgcagcaaaagccgccagcaggcctttatcctgtgaaagatgcgccataattctcagttcgatttgagaataatcggcagccagaatgctgtaatcggttggtgcgataaatgcctgacgaattcgtcgaccttcctcatttcttacaggaatgttttgcaggttaggatcgcgagaagataaacggccggtagccgttaccgcctgatgatatgaagtatgtactcgcccggaaaccgggttaatcattaaaggtaacttatcggtataggtacttttcagcttggccaggccacgatattcgagaataaccttcggcagcgggtaatccagcgccagttctgccaacacttcctcattggtggacggcgcgccgcccggcgtttttttcaaaatgggcagtttctgcttttcatacaaaatggcctgtagctgcttcggcgacgccagattaaaaggttcgcctgccaattcgtgcgcctgtttctccaattcagccaaacgaatggttaattcttgagaatgcgtagaaagaatagattggtcgattaacacgccggtgcgttctatatgcgacaaaaccggcagcagcggcatttcaatttctcggaaaatacgcagtaaaccttcgctttcctgtagcttcggccacatggctaaatgcaattgcagagtcacatccgcatcttctgccgcataaggcgaagcctgttccagtgcaatctggttgaaagtcagctggttcttaccttttccggcaatttcttcaaaagtaatggttttatgattgagataacgctcagacaggctatccatatcatggcggccagcaacgctattcaacacataagattccagcatggtgtcaaattcgatgccacgcagatcgatatcataacgagccagcaggcttttatcgaacttcaggttctgcccgactttatgcgatttcgcgtcttccagcagcggtttaaggtgtgccaatacccaatcacgatccagctgcgctggcgcgtccagataatcatgagctacgggcagataagccgcttcaccgggagcaatagcgaaagaaagcccgatgagattggcagtcaaagtgtctaaaccgtcagtttctgtatcaaaagcaaagacatcagcctttttcagccgctcaaaccaatcgaagaaagtttcttcatccaaaatggtctggtagttttcttgtgaaagctgtgccgtcacctcagcaatcggagcagcaatatctacagcggcggcagctttactatcactcttacccgtccccgtcgggcgcggtttattgccctccagccactttccgccttctaaatcaaccagccagcgtttgaattcataacgcccaaataatgtatgcagctgatcgacatcgggagccgaaaccgtcaactcgctacaagtcacatccagctcaacatcagttttaatcgtagccagtttataagagaggtaggcaacgtctttgttctgttccagcttggcagccatggttttcgcgccgcggaaagtcagggtcgcgattttatccagattgctataaagcgtatccaacccacctaagccttgtaataacgcctgcgcggtcttttctcccacgcccggcacgccaggaatgttatccgacgcgtcccccatcagcgccagaaaatcgatgatcagttctggaggtatgccatatttttcgcatacttcttctggaccaaggatggtgttgttcatggtattgatcagggtgatatttggcgtgactaactgcgccatatctttatcaccggtgctgattaatactgagtggccggctttctcggcttcctgcgccaaagtgccaatcacgtcatcagcctcaacgccagaaaccgctaacagcggcagccccatcgctttcaccatttggtgtaacggctcaatctgcgagcgcaaatcatcaggcatcggcgggcggtgagatttatattcagcaaatagctcatcacggaaggttttacctttggcatcaaaaactaccgcaacatggcttggatggtactgtagcagcaggctgcgcagcatgttaagcacgccatacatcgcacctgttggttccccgctggcgttggtcagtggaggaaatgcatggtaggcgcgatagaggtaagaggagccgtcaaccaggattaaggggttttctgcgatttgtgccataaggtgtcttcatctttaattgctgagtctggtgctaagaatgccatagctgacagcaagagacgaatcttagcggcctttcttgtgtgattttcgtgagcgatcgctgcatgatcgaaccgatccgttctgtggataactttgtgagtaaaagagtaaagaggatctattttaataacattacccatcgagagtattattaaaatacatataaatcattgagttaaaataatctacattcacaattatcgtcatgaaatttttatcgtaattgtggatattagttaattgaactttttatatagggaattaatattggtgtattttcctggcggagaatattggatatcaaaattttaaaaacggtggatagcttttcaggccctatggatgtgacgctggtataaattaaaacaccttactgtaaaatgcttaagcgatatttctataatcgatagattggtttttaggaattttcttaaactaattgaatcaattgaatattcaatgaaggaaaatcgtcattttattccagcctagttaattaaacgttgtcactttatattgataatacaaatttattccatgtttatcatagtgtttttttaaggtaataaaccggccgaagccggtttattatcactgaattatcattacttttgtttaatcaaaaagttaacgacatcagaatattgtttagcgtaggcttcttgtgaagaggtatcaataccgtcgtttttgatttggtatttaccattcacgaacatagcaggaacgccgcgtaatccgaggtcttcagccgctttttgttgttgcgcgaccaatgatttaacgacgaagctattgatagcactatcatactcttctgcaggaacaccggctttgataaacacattacgaatatcagatggagtctgaacaacctgagttttctgcacaccttcaaacatcaatggagtaattttatcttctacacccaatgccaaggcaacagcccatgcctgagttaactctttacctagaggccccaaaaagtctacatgataacgagtcattttagtgccttctggcagtgacttcttcactgtttcaggcactttatatatctcttcaaactgatagcaatgtgggcaatagaatgagaagaactccaaaacctgcggctcgcctgttgccggtttatctaaagtcacatattgggaaccatcagaaaattgtgctgctgaggcactaaatgccatcaccatacccactaatgcaagccatactttattcatacaataaaaatctccattatcttaacatcaatacattggaatcagctgtagagggggtgcctgcaacaacttaacctgctctgcaaataccgaagtctgctgtaaccaaaaatcaggctccgccatccacggaaaacttttaggaaaagctggatcttgccaacgtctgacgacccaagccaggtaataaaccatacgcatagcgcgtaaaggttcgatcaacgttaattcccgctgatcaaaatctgcaaattcgccataagcctccagcaatatatccaactgaataagctgctcgctacgttctccatgtaataacatccagagatcctgcactgccgggccattacgcgagtcatccaaatcaacaaaaaatgggccgtcacgccaaagaatattacctgggtgacagtctccatgcagacgaataggctgccagtcagtacgccagtactgtttgatagtatcaataagcaaatctgttgcagctaaaaacttatctttctgcttggttggaaccaactcacagtctgccagcaggcttcgcggttcagtcagatattcttcaacgctcatcgttggtcgggttataaaccggcttttgctaccaacccgatgtattcgcccgagaaagcgcccgacccactctaattgatccagattatcgatctcatactgacgcccgcccacgctggggaatacaacaaagaaaaaaccgcagtgggtatgcaaagtctggccattcagcgctaaaggcgctacggccggaatttctgcttccgctagatcgagagaaaaacggtgctcttcctcaatttgggcggcattccagcgctcaggtcgataaaatttcacgacataacgcttccggtcttcatccataaactgataaacccggttttcatagctgtttaacgccgttaaacctgaatccactcgcaatccgacgccttcaagggcatccatgatcaggtctggagacaatgactgaaaattaaaagcagagttatttagaacagcatttttaggcatcagttattcacggtgatctattgatagcagaagataacatcattcaaaaaacgtcggcattcattgccatgactaatctttaatgatgccacgagcccgtaacaacgccgttttgaaatcttcttcatagtcttttttcaaacctggaatggtttctgtagcggcagaacctcgcatcttcagatgataaatgagaatatcgtccgtcaaatctgaaaaatcgcctttaaaacccgcttctattgccagcttttgcaggaactgaatgagattcagatcgggttcttgttgccaggccggatgtaaaagttcaatcagttcatttacgcgatgacatttcatagaaaaactatcctatttgaaaatatgaagacaaagtagcagggttagccaggtagtgaaagagacctaactgtcaataaaggtaaatccttactccgtcactggtttagttatacaattcctgaatcgcttattgtaataaggtcggccaatgcagccaatgattaccggaataattctcgcaggagggcgctcaactcgaatggggggggaagataagggattgcttcaactgagcggaaaattgctgtaccagcatgtcgcagataaattggctcctcaggttaagcatttactgattaatactaaccgcaatatctcttgctatgagaaatccgggattccagtttttagcgatatcactgacgacttttccggccctttggcgggaatgctagcaggattaaatatagccgcgactgaatggtgcatttttgtgccttgcgatgtcccagatattccatcaaatatggttgagaaactttggcagggccgaaataacacgctggccgcttatgtgaacgatggtgaaagagatcatccaacgctggttttactgcataaaagcctgataacaacattagagaactatctggcaaatggagaaagaaaactaatggtcttactccaaaatattcatgctcaacgggttatatttaatgaatcagcagagatgttttgtaatttaaatacgcctgaagactgtgcgttatgggaagaaaggaatacagaaagacaatgagcaagccaattcccccactcctaggaatagcggcatacagcggcacagggaaaacgacattactgaagcaacttattcccctattacgacagcgtggcgttcgggtagggctaattaagcatactcatcataatatggatgtcgatacgccaggtaaagatagctatgagctacggaaagccggtgcagaccagacattagttgctagtgataaacgttgggcgctaatgactgaaacgccagataatccgtcattggatctccaatatttagcaagccgattggatgcaaacagtatcgatctcgtattggtcgaggggttcaaacatgagcctatcaataagatcgccctatatcgagcggctgtaggaaaaccttttaccggagtaatcgataagcatgttattgcgctagcaagcgatgaaccggcacctacagatttaccgcaattggatattaatcaaccctatcatattgctgatttcatctgttcctggctgaaaagtcagtcttaactgctgctgatagtataaagctggtcacgccattaggttggctcgaagatgatgacttagctgacttttcaacaggacgcttgcgcctgacagcccacactcttgccgctaaaaccacttttcaaacagccacttattcacaccgttaatagcatcttataacaccctgataactgggctaatttggggtagggttgcatcacattgcctaaaacttcggcaaaatcaccctcattgcaagttaacaacacaacaatctagatgataaaaaaggttatttggtatgtagcctgactcgtcagtcaccgccagagttttaaccagcagttaaaaatcttctgtctgttactcttcgcagtgaggccggtagtgtatcagaggcctcagcatcccgactggcgacacgttttatccccttacgccccaccggatgcaagcctggctcttgagctaccgccgagtgtgaatacccgttaatggggatgagtttccgataaaaccgacctggttcgttggttacatggctttttaataaaatataagcccggtgagtgactgtatctgcctgaaaatgctgcgaatttactgcctgaaaacgtcaacggcggcgcaatttaccggataagccgccccctatggaatgaaaatcgccatatacgccttcaacgcccggcattcccgggggttcccatgcccttaaacgcaaaaagccccccgcaatcgcaggaggctcggttcgagggcggcaatgacttttatccgcctcgcgtctgtcttttttccatagcaaaaaccccacgcttttggcatggggtcttggcttgatttgatgcctggcagtgtcctactctcgcatggggagaccccacactaccatcggcgctacggcgtttcacttctgagttcggcatgggatcaggtgggaccaccgcgctattgccgccaggcaaattctgttttaatcaacccgccacgtgatttacatcacacagccagtcaatccaatctgttaacaatgctgaaaatcaaaacgctctctaaaacaccttcggtgttgtaaggttaagcctcacggatcattagtactggttagctcatgcatcgctgcacttacacacccagnnnnnnnnnnnnnnnnnnnnnnnnnnnnnntcttcacacacgcgncatgnctgcatcagncttgcgcccattgtgmaatattcccactgctgccttccgtagaagtctggaccgtgtytcagttccagtgtggctggtcatcctctcagaccagmtagggatcgtcgcctaggtgagccattaccccacctactagctaatcccatctgggcacatccgatggcgtgaggccmtaaggtcccccactttgctcttgcgaggttatgcggtattagctaccgtttccagtagttatccccctccatcaggcagtttcccagacattactcacccgtccgccgctcgccggcaaagtagcaagctactttccgctgccgctcgacttgcatgtgttaggcctgccgccagcgttcaatctgagccatgatcaaactcttcaatttaagatttgtttgatttgctaccgaagtagcgatgctcaaagattactttctgcaaatatgcattcgaaccgaagttcaaatgtttactgctttggtcactcttcaagacttgatatttcttctgcctgccgaaacaggctttgatatcgtcttgcgagtgcccacacagattgtctgataaattgttaaagagcgttcgttacccgttcgcttgcggcgaatcttacggtaacgcgggaggcagataatacgctttcccgctgaagtgtcaagcttttcttttcaactttcgttttaagaaccggcgtttccgcctgcttaacacttcctgacccggcgaagtttgtttcgttgttcccggtcagtggaggcgcattatagggagttcctgacaggctgcaacccctaatttcaaataattttccaaccggctttttttcatcaaaaagtgcggaaatggataacttttctactacttttcagttaaacagccaataccagagtgaaacagtagagtaaaatagaaggataagaagttagccaggacaaatcaccatgcaatttaacgcccaacaacaagccgcccaacgcaacctttcctatttattagctgaaaagattggccagcgtatcctggcgggcgaatatatagccggttctatactgcccggagagatagaactaggcgaacagttcggcgtaagccgcactgcagtacgtgaagcggttaaaatgttagcggcgaaagggatgttgttgccacggccacggattggtacgcgcattatgccgcagtccaactggaattttctcgatcaggagttactcacctggtggatgacccgtgaaaacttcgatcaggtgatgcagcactttattttggtacgaaccgcgttagagccacaggcctgcgctttggccgcggttaacgctaatcctgcgcaaaaacagcaattggctatattgatggcagaaatgcaggcgctgcaccgtgaatttgatcgtgaacgctggattcaggtggatacccaatttcatcaactgatctacgaagccagtggtaatcccttcctgacttcgttcgccaatttgttcagttcggtatatcacagctacttccgtgctattaccggcgatgaagtgataaagctgcaacaccaccaatctatcgttgataccatccttgccagcgacagtcagggtgcctgcattgcctgtcaggtattattacaagacaaaaactgacggagtgtgtaatcacatgttatctatatatagaagagaggattgttaataacgaattccatcaggaaatagaatgattaaatctgctcgtagcatggccggcttaccctggattgccgccatggctttctttatgcaggcgctggacgcaacaatattaaacacagcccttcccgcgatagccgaannnnnnnnnnnnnnnnnnnnnnnnnnnnnnnnnnnnnnnnnnnnnnnnnnnnnnnnnnnnnnnnnnnnnnnnnnnnnnnnnnnnnnnnnnnnnnnnnnnnnnnnnnnnnnnnnnnnnnnnnnnnnnnnnnnnnnnnnnnnnnnnnnnnnnnnnnnnnnnnnnnnnnnnnnnnnnnnnnnnnnnnnnnnnnnnnnnnnnnnnnacgaagggtaatcaggcgcgatcgaccgggaacgccataacctcgctcaatcgctccgctcccagcgccagcatcaccaaacgatcgacacccagcgcaacaccggagcaatcgggcataccgtgctgtaacgctgcgatcagattgacatcgattggattttgcggcaatcccagaacggcgcgtcgacgattatcctgctcgaaacgtttcaactgctcgttggcttcggtcagctcgcggaaaccgttggctaactccatacctttgaagtagacctcgaaacgctcggctacccgatggtcttcggtactgatttcagctagtgacgcttgagaagcagggaaatgatacacaaaggccggtttttcacggccaatttgcggttctacgccaacggtgaacagcagctgtaatagcgtgtcgcggtcatcttccgtatcggcgatattgctcaaatccagcttcgccgccgcttcccgcagctgggttttgtccgctgacagtggatcgacatccaaatgacgcaggaaagcctgctgataagacagcgtttctgcgctgttacaatccagaatctgctgtagcaggtcgtcgacctcattcattaagcgatacatatcataatgaggacgataccactcgagcatggtgaactcgggattatggtgacgaccggcctcttcattgcggaaactacgacccaattgataaatggagccgctgccagccgccagtaggcgcttcatgtgatattccggactggtcatcatgtacagcgtcatgccatcggcagcacccgggccaacaaaccgggtttcaaaaggagacaggtggatatctgtcactgtcgcttggctcatggctggcgtttcaacttccaatacgccgcgatcggcaaagaaccgtcgtatttctgccattattgctgcgcgtttcaacaaattggcgatgggtgcacttggctgccagcttgccgtttcgctcatggtggttaactccgaaatcaaacaggggatgcagtctactcgcatcctatcaggcaaacaaatttgcgacaaagattgcctatttatgccacgaattcagcataacgcgtcgtcaaaaatccttatcaacagcagatcctgtctgcgatcacgtttctgccagttagcccgcgcgcagaggttcaaataaaacaaaacaatcgatcacatcaaatttctactacttatgattaggtatactcattcccatacaaatagtaagaaattgctattcttaatgagttcccccttgcatcgggtaattgattagcaaggcaataatattaaaaaccatattaagaatagacattccttttatatagccgaggtcattgaagttacaggtaggcaactggcaaaccgatcccgatcaactgattcaggtttttgattcggttgagaaagtacagttaacccaccgcagcctcaggtaccaagggtataagaatttcacttgaacaatggagaagcgcagtgcaaacctttaacgccgaccttgccattatcggggccgggggcgctggtttacgtgcagcaatagccgcagcggaagccaacccccaactgaagattgctcttatctcgaaagtttacccaatgcgtagccacaccgtggccgccgaagggggatcagccgcagtcactcaggaccacgattctttcgactaccatttcaacgatacggttgccggcggcgactggctctgtgaacaggatgtcgttgaccactttgttcacagttgcccggaagaaatggcgcagctggaaatctggggatgcccgtggagccgtaaacccgacggttctgtaaacgtgcgccgctttggcggtatgaagattgaacgcacctggtttgccgccgataaaaccggcttccatatgctgcatactctgttccaaacttccctgaaatatccacaaatccaacgctttgatgaacattttgttctcgatattttggtggatgatggacaagcgcgcggcgttgttgcgctgaatatgatggaaggcaccaaaatccagattcgcgccaatgccgttatcatggcgactggcggtgccggacgtgtctatcgctataacaccaacggcggcatcgtcaccggtgatggcatgggcatggctttccaccacggtgttccgctgcgggatatggaatttgtacaatatcacccaaccggcttgcctggctcaggcatcctgatgaccgaaggctgtcgtggcgaaggcggtatcctggtgaataaagatggctaccgctatctacaggactacggcatggggccagaaactccgttgggtaaaccagaaaacaaatatatggagttggggccgcgagataaagtttctcaggctttctggcacgaatggcgcgctggccgcaccattgcgacaccgcgtggcgatgtggtttatctggatttacgtcacctgggtgagaaaaaactgctggaacgcctgccgttcatctgcgagttggccaaagcctatgtgggtgtcgatccggtaaaagatccaatcccagtacgtccaaccgcacattacaccatgggtggcatcgaaaccaatcagcagtgtgaaacccgtattaaagggctatttgccgtcggtgaatgttcttccgttggcctgcatggtgcaaaccgcctcggctctaactcactggccgaactggtggtctttggccgcgtagccggtgaacaagccgcacagcgcgccatggaaagtggcccggcgaacggcaacgcgctggatgcgcaaacccgcgacgtagaggctcgcctggccaacctgatgaaacaggaaggaacggaaaactgggctaaaatccgcgatgaaatgggtctttccatggaagaaggctgtggtatctaccgtacgccagaactcatgcaaaaaaccgtcgataagctggccgagctgaaagagcgctttaaacgcgtgaaaatcaccgataactccagcgtattcaataccgacctgctatacaccatcgaactgggctacggtctggatgtagctgaatgtatggcgcactctgcacttaaccgtaaagagtctcgcggtgcccaccagcgtctggatgaaggctgtaccgaacgcgatgacgtcaacttcctcaaacatactctggccttccacacaccgggcggcacgccgcgcctcgagtatagcgatgtgaaaattaccaaactggcaccggctaaacgtgtctacggcgccgaagccaccgcgcaagataagaagacggcacaagataaaaaggataaggagcaggcgaatggctgatatgaaagtcctgaaaatggagatcatgcgctacaaccctgaacaggatagcgagcctcacttcgacactttcgaagtgccttacgatgagcaaacttcattgctcgatgccttgggttatatcaaggacaatctggcgccagatctgtcttaccgctggtcttgccgtatggcgatctgcggttcgtgcggcatgatggtcaaccgggtacctaaattggcctgtaaaaccttcctgcgggaatataccgagggcatgaaagtcgaagccttaggcaacttcccgatcgaacgcgatctggtcgtggatatgactcactttatcgagagtttggaagccatcaagccttacattatcggcaataaacaagatccaaaagatggcccaacccgccagactccggcacagatggcgaaataccatcagttctccggctgtatcaactgtggtctgtgctacgccgcttgcccgcaattcggtctgaacccagagttcatcggtccggcagcgattacgctggcacaccgttacaatctggatacccgcgatcacggcaagaaacagcgtatgcctcagctcaacggtaacaacggcgtgtggagctgtaccttcgtcggctattgctctgaagtttgtcctaagcacgttgacccagccgccgcgattcagcagggcaaagttgaaagtgcgaaagacttcatgatcgccatgctgaagccacaataagggaggggaaacagcaatgacaactaaacgtaaaccttatgtccgcaccatggccccgaactggtggcagaagctgggtttttaccgcttctatatgctgcgtgaaggcacctccgttccggcggtctggttcagtattaccctgatttacggcgttttcgccctgaaaggtggcccggcaggctgggaaggatttgttagcttcctgcaaaacccgctggtgctattgattaatatcatcacgctattggccgcgctgcttcataccaaaacctggtttgagctggcacctaaggccgccaatatagtggtaaaagacgacaaaatgggaccagagctgatcattaaatcgctttgggtggtgactattgttgcgacagcggtcattttggccgtcgccttaatctaacccggagggaaataagatgaatcaagttcctaagcgctccgatgaaccgattttctggggtctttttggtgctggcggcatgtggggagccattattgcaccagcggttattctgctggttgctattttgctccccctcggcgcatatccaggcgacgctttaagttacgagcgggttttggctttcagccagagcttcatcggccgcgtattcttgctgctgatgattattctgccgctgtggtgtggcctgcatcgtattcaccacgctatgcatgacctgaaaattcatgtgccagccggcaaatgggttttctacggtctggcagccatcctcagcgtagtcgctgctatcggcgttctcactctgtaattctgaacaaaacggcctgccccgcgcgggccgtcttccctttgccccacttgtcatccccctcaaaatttgcatcactgatagatgagagttattttcaataagaacttattactaacaggatgcctcgctatgtctgtcccactgtggtcaaaaataacggtacttatgtctgccctgctctccgtggcttgcagcgtaacgccgccaaaagatgtcaaaattgtcgataactttcagttacctcgctatctgggcacctggtatgagattgcccgtctggatcactcctttgagcgaggtttagagcaggtgacggcgaattattcactacgcggcgatggcgggataaaagtaataaaccgcggctataacccacaaaaacagcgttggcaggaaagtgaaggcaaaggttatttcattggcgaacccaatcgggcggcgctaaaagtctcctttttcggcccattctatggcggttacaacatttttgagttagatgaaaactatggttatgctctggtatgcgggcctaaccgtgattatctgtggattctatcccgtacgccaaacctcagcgccgaagtacgtgaaaaactgctattaacggccaaaggctatggtttcccagtggaaaaactgatctgggtgaagcaggaataagctagaactgagatcgaaaaagggccgaagatcggcccttttctattctgatatttatcaattcgctaacgtttagcttaactagctaatttcaaaccaacaataccagcgacaatcatgcctaagctaagcaaacgtgccgcgctggcggactcaccaagcagcacaatacctaaaatggccgtacctaccgcgccaattcccgtccaaaccgcataggcggttcccgcaggcaggcttttcattgcatgagccaatagcaccacgctcacaaccattgccgccagcgtaataatactgggcgccaaacgagtaaaaccctgagtatattttaagccaatagcccaaataatctctaataatccggcaataaccagaataacccaagccatagtaatcatcctaatgggaggggtcgtccccagatagcagcggttttgccgggtcgtcccgggctgcaaataaaaccgcatttaaattagcacgacgcctaacggccatcaataaggtgggaggaacaatctggtgcccaagaatggctaagggatgctagggaaagatataacaggaatgaccttccgccgttaagatttaataaaaatcattagaagaataaaaaacaaaaaattaatgatttaaaattattaattagctattgaagtacatacaatcaacactaggaataaccttaaattctcgattgagaatagtcctaacattgatatatttcatttccattatcttaatcacaatttattgattgattttaaagaaacacgcaaaagaaaattttattaaattcattatttaacactagttcatggctatttttttgcaaaattcgatcttatatttcaatatttactttagagacaaataattatcccaaattagctcaatcatcgatcgaatataatgtaaaaaacaaaatttgcagtatattaagccgagaattaagccgggcaattaaattcatgatttaacaaatcagggcttcgcctgcttattcccccacgccagtaatatgtggaatttaacaacatcatttttatctcaaggatttgataatgaaaaagttattattaactgctgttattgcagcatctttctctgcggctgttcatgcggcgccacctgctgccggttcccctgggaccatccgttttgaaggcgaaatcgtcaccggcgcctgcggtattgattctaattctttagatcaaaccgttaatttaggtcaggttccttcccatttatttacggcaaaaggcgaccgttcgacggcggctaagttcgatatcgtattgaccgactgcgataccactacgtctaaaaatgccaccgtaacctttaccggtgctggccaccaagaaaatagcgaactgttaggcgttactggtgcagcaactcatgtgggtatccgcctacaggccggcaataatgaatatctggcattaggcaccgccactaaacctattatgttgagcaatggggataaccgactgcaattttcggccatgtatgaagccactgatgcaggcgtaaccgcaggtgacgcagattctacagcgcaatttacggttaattatctctaataatattcaacggctttaatattaagggggaatatattccccctaaacatacagggcaagaattgtgaaaacttatagcttttataagtgggtactctgcgtacctttttttgccttcgaggctgttggcgtagagtttaatactgaatttttaaaaattggtgaacagggtcaggctgacctttcacaattctccgcgcccgatcgattggccccgggaaattatctcgtcgatatagttgtaaataataactactacaagcaacaagaaattaactttgtcgaaaatgcgaaacatccgcaaacacaaccttgtttgcctcgtagtctgattagcacttttggtttaaaacgagaatatatctcgtcgctgcctgaacactcatgcctactgatttacccggtattaccgcacgttattataaaaataacggacagttgaaaattaccgtgccgcaatccctactggaatattatgacaaaaactatactccaccagagcaatgggatagcggtattgccggcctgatgctggattaccgcatcatcggaaatacccgccagaataaacatgaggatagagttaattccctttctgcatttggcacgaccggggctaatttaggtgcctggcgttttcgtggcgactatcagtttgctaattacagtaataaagaaggcaatcaatctttagattttaataacatccatgcctttcgtccgttgccctcaataaaatcgcagctcactttggggcaaacctatttaacctcggatattttcgacacgctcagttacagcggcatcaagctcgccagcgacgagcgtatgctgccgcccagcctgcgcggctacgcgccgcggatcaccggtatcgctaaaacgaatgccaaggtaaccgtcagccagcagggtagaaccatttatttaaccaccgtgccgcccggcccgttcaatattcaggatttgagcagcgcagtacaaggcgagctgcaggtcagcgttgaagaagaagacggttccaccagccaatttaccgtaaataccgcctcagttccctttctaacgcgagagggacaaattcgctataacaccgcgatgggtaaaccgaccaacggcggtaatcacgtacaaaacccattctttaccatgggtgaaatctcctatggcgtcagcagcacctggtctgcctacggcggcactattctggctaacgattaccactctgccgccgttggtctgggtaaagatttatatcaattcggcgcagtttcgctcgatgtgacccaagctcgcgcgactttggaacatcaacaatatcttggtcattcctatcgttttaactatgccaagcgtttcgacagcctcgatgccgatatccgcttctttggctatcgtttttccgataagaaattcatttccctcagcgaatttaccaatgccagcaacggggtattacagcgagataataagcaacgctactcggtagttacggctaaacagttcgatggcttttctacctatctttcttatacccatgatgcgtactggaacgctaaatccagcgaacgtttcgatctttctgccagcacgctattcgacattgagcagtttaaaaatgtctctctcaatatttccctgtcttataacaaagatcaggatcgtaacgatctggtgagttatttggggatcagcatacctctcgaagggcagacccgcgtgagctataaccagcaaactggccgcggtcgctttgaccaaaccgtgtctctgcgacaaaaccgaggtaaggacgattattaccagctaactaccggcggccagcaaaataacgctctggtcagcggcttctatcagcataaatcagatgcctaccagctgggattaagcggcagctatgtgtctgacagctatcattctgctagcgctaatctcagcggttctatggtcagtactttgtacggctccgcgctacattcttccggcagttccggcaacacacgcttattggttgatacccacggtgtttcagatgtgacctttaataacggtaaaaaccacactaattcattcggctattccattatcgatggcgctcctccctatgagaatttcgaggcgcgagtcgatatgaataacctccccgcgaatgccgaagcccatgcgccgatccgcagtctggtgctgactgaaggtgccatcggctacctgccgtttgaaatgaatcagggcagcaagctgttggtattactgaaggattaccaaggtgtttccgtgccgttcggggccgaagtcaccaatacccaaaccggtaaagctaacgccattgtcggcgaagacggcctgacctacctgatcggcgtgaaaccagagagtcagcttaaagttcgctggtcggataaaagctgcaccctcgtcctgccacaggtattgcctgatgccgttacgacgcctcaacccatgagttgccgctaacccttttgttaaaaatgacgcttaggaattgaatatgaagagaacattacatcgctatttcatcaccattctgacgctgctgttatgcggtggactcagctccgctcaggcggctctggtattggatcgcacacggatcatttatcaggaaggcgcgcagtctattagcatcacgttgaccaataaaagcaccttgccttatgtggcgcagtcttggatcgaagatagcgaagggaaaaagatcgcttcgccttttctagcattacctccgctacaacgagtggaacccggcgatcgcaacgtcgttcgtgtcactctcctaccggataacgcgatccctaaagatcgagaatcagttttttatttaaatattcgcgaaataccgccgaaaactgataaaccgaacgcattgcaaattgccctgcattctaaaatcaaattattttaccggcctaccgccgttattcctccgcgtggggaaaataatgccgccaaactggccatcaccacccaaggtaagcagctaaccattaaaaatacgacgccgctgcatgtcaccttggtggccatcgccataggagccggaaagtccccgctggtatttgaaccaaaaatgttatcgccgggagaaagcatcgtagtacccacaaaccatcctgttaacggccggatttatatatctcatatgaatgattatggtggccagcaggataccgcctacgattgttcagcttctgaatgctccagtaacgataagcagaggtcataatgcgacgtttagcctctcttttatgcctgggcatggctttggcctttctgtcacccgcagtttgggccttggcctgcgttcgcaccgatggcagcggtttaatcctgaccgaaagtatcggctcaacggtcaaagtgcccaccactctccccgattacagcgtgatttggcgcggccccacccggagtatttccgctcgctgttatcgcgataacaatattcgcgaaatggagaacatttacttctacgtcaatccgagaaacaccaatccattgaactggggaattgaattcgggatgcgttttaacggcactgaccagtggccgcagggcggtggtaacggtgctggaatcaataccggtagcgtgataccggcctgtaaagcaggaattccgctggcacagtgtcctgatgtcacctttgccgtcacctttcagccgattatccgcaaacgtgggctggatccgttctcaccaacgccggatagcacctatgccctgtaccaactggacggcaaatacggcctaaataacgctcgcgccaactttacctatgttattaccgatttaagtctcataaccgcaaccgattgtaccgtggatgtaaccatcacaccttcccccggcgtcgtcgatttcggcacggtgcagaagactccctccggtttttcaccggcggtaccgcaacagtttttttcactggttctggataaaagcggctgtaaaacaccgattaaaatcaacggctatatcacgactcccaatgcttatggcgactatctgctacccagcgcagacagtggctttggtatcaaactaaccgatctggcaaccaatagtcagattccattggccaaaccgttctttttagcggatttcaccgcgttagatacacagcacgaagtgttactcagcgctgagctggttcctctcggcgagattaaagtcgggccattttctgcgactgcgacggtggaaattctctatctctaaacttcgggacagatgcggttgaacgtccttcatatggatttgtaggggattgaaatgaagaaagtcgttttgattgatccatgccgctttagccgagttggtgttgaatggttaataaactcgcgcatgcatttggcatctaaagttgcactggcgcaaaccagcaatctggtggtcgccaatgcacaaattaaactgtggcaacctcaattggttatcgccgatctttattcttacgtctttgaaacacataaccttaaaattttagagtcacttttggctacctgtatctccagcaagttactggtttatctgcactcccctttgccttggctcagccaatatcttctagatcgtggagcgtggaaagtcatcaccaaaaaacataacatcagtcaattggaacaattagtaagtgctgcattatgcaatccgatgggaaattactctgagcaaccattacaacccgctccggcattatttagtgatagagaggagtcgatattaaattactggctggaaggctgggttgataaaagaatagcaaacacattagatattcatattaaaacagtttatacccacaagcgtaatattcgcctcaaattaggtgcgagcaatcggctttctctttatctggatctatcaacaaatcaaggtcaataactcaaattggcggcagcaacctgatctgttgccgctgattttagtggatacgtgatatggatagatttattcggtgctagcggtgttatcaaatcaggccagatctatctgaatataaagaaaaaccattattattttccacatcactttagcttaacggatgagcagttcataaaaatcatgtcatcaataacccccccatcaaaaaaaaatcactggaattaatatttatagatatttaattattttatgaaatacatcactcatattaagtcgttgcgaaaaccataggtatcagtgattgttacatgaagaaaataaagagttaacgtcctgccagcaatagatgaagaatataccatagagaaaaattggagtattacacataaaaaaggaatgaattatgaaagataacaaaactatagcattcatattattttctattttcatgatattcagtcaattttcttcatttgcccaagcccatggatatattcaatatccagctagtcgagcctatctatgtcaattaggaaataatactcaatgtggctctgtacaatatgaaccgcaaagtgtggagggtataaaaaacttcccagaacatggtcccactgatggagctatcgcgagtgcaggagtcggtatgtttacaccgctggatattcaaacgcccacccgttggtctaagtcaagcatttactctggccccattacattcacttggaatattacggtagaacatagtacaactcgctggcgttattttatgaccaaaccaaattggaatagatcagcaccactctctcgtgcatcatttaatttaataccattttgtcaatataatgattatggaagtattcctgataaatccgttactcatcaatgtgtattacctaacaaccgcacgggttacaacatcatccttggcgtatgggatattgcagatacgaataatgcattctatcaagtaatagatgtcgatataattggttaatgttatcaacaaccagagaaacaaatacacagtggaaaatacagatcggttcccggattagttttgaagtgggaaagataaagaaccccaatattcgaatataactcaattattggggttctttatttattaactgccagagttatctggatcagttaataaatcataactatttcaggcactaattacttaacacgagaaacatattcgccagagcgggtgtcaactttaataacttcaccaacctgtacgaacaatggcactttaaccactgcgccggtgctcagggttgccggcttgccgccggtaccggcagtgtcacctttcagacctggatcggtatcagtgatttccagctctacaaagtttggtggagtcacaacgataggctgaccgttccacagggtaacgatacattcagcctgatcgatcagccatttggcgttttcgcctacggctttaacatctgctgccagctgttcgaaagtttcgttattcatgaaatgccagaactcaccgtcgttgtacaggtaagtcaggttcatatccatgacgtctgcgccttccagagagtcggtagatttaaaggttttttccaactgtttgccagtcagaaggcggcgcattttcacacgcgcaaaagcctggcctttacctggcttcacgaactcacttgattcaacggcgtaaggttcgccttcgaacatgattttaagaccgggacggaaatcgttgctagaataagtcgccataatggccctctgaatattgaaactggtgttaagcccaaaaaatggcaaacattgtaacccgaaacatgccaattagagaagattggttgcagcaactcgccgatgtaattaccgatcctgatgaattactccgacttttagcgctaaatgatcatgccgagctacagcaaggtagggacgcccgtcgcctgtttccgctgcgcgtgccccgcggctttgttgcacggatgcgcagcggcgatgcaaaagatcctttattgctacaagtccttaccgcacgcgaagagttcgtcaccgctcccggttttactaccgacccgctggatgagcaacgcagcgttgttccaggcttgctacacaaataccgcaatcgcgcactgctgctggtaaaaggcggctgcgccgttaactgtcgttactgtttccgccgtcatttcccttatcaggacaatcaaggcaacaaggccaactggcagcaagctttggactatattgctctccaccctgaactggatgagattattttctccggcggcgatccgctgatggccaaagatcacgaactggattggctgatcacccagttagaggccattccgcacctgaaacgcctgcgcattcacactcgtctgccggttgttattcctgcgcgcattacctctaccctatgtcagcggtttgcagattctcgcttacaggtgctgatggtgacgcatatcaatcatccgaatgaaatcgaccaaccgctgcgtgacagcatgacgcgcctcaaacaggccggcgtaactctactgaatcaaagtgtattactacgggatgtaaatgacgatgccgacgtgctggcagcgttaagtaatgcgctgtttgacgcaggaattctgccgtattacatccatgtgctggataaagtgcagggcgctgcgcattttatggtggatgatgatgaagcaagattgctaatgaaagggctacttagtcgggtttctggttatttagtgccaaggctggcgcgggaaattggcggggagccgagtaaaacacctttggatttacgcttgacgcaaagctagcctgcaaaataaatcaggagataccttggcatctcctgatgatttatttcttttcgcttaaactctggcaagcaaaggttatgggcacttataaacctgaccaaccatcttgctgtctaacggagcgaagctggacaagaaggtctcgctcgggctggttgcaccaaaaatcacgttgccgcccatcgctgccgctttgttacgcagatcgttggctgcaccgcgcatagaactgctttcaccgccctggccggataaccagttgctttggctgccgctgacttcgccaactaactggcattcgctaccaggcttagtatcagagaacttaacctgctcgccagccgcagttaactgggtggtagagctacagccagccagcaacattgccgctgaaagaccaagtaatactttaatccgcatttttttccccatcagatattgagaatcacgccaaagtttaccagaaagcaaagtcgccgcttaggcatccgttgccacatttatctgggcaataatagcttacagtttacacgctaactctgcgctgtggctaaaaaaatcccagtgggcatcacacgactgaattaaaccacattttaaattcattaaataaatgtataagcctaaaatccggtaacaagcttatatctacggagaaatacgaatttcatcaatttggcaacaggtgaaggaaaggtgcgggattgttgattatggcaaggttgaccgtgatagcgccggagcagagagggagaaaagaaaaaagcgagcaggtttccccgctcgctttaggtttatagcttattcgcaatcaatgaagctatagggtgtggggcattacatcatgccgcccataccgcccatgccacccatgccacccatgccaccagcgcccatgtcagcgcctttatcgtcgcgtggcaggtcggtgatcatgcactcggtggtgatcatcaggccagcgatagaagctgcgtattgcagagctgaacgggtaactttggttggatccaggatacccattgcgatcatatcgccgtactcttctgagtaagcgttataaccgtagctgccttcgcctgctttcacgttgttcgcgataacagaagcttcttcaccggcgttaaccacgatctgacgcagtggagattccattgcgcgcagcgcaactttgatacccacgttctgatcttcgttgtcgcctttcaggccagagatagcgtgagctgcacgaatcagtgcaacaccaccacccgcgactacgccttcttctaccgcagcacgagttgcgtgcagagcatcttcaacgcgagctttcttctctttcatttcaacttcggttgctgcgccaactttgataaccgcaacgccgccagccagtttagccacgcgttcttgcagtttttctttgtcgtattcagaagttgcttcttcgatctgagcacggatctgagcaacacggccctggatcgcagcttcgtcacctacaccgtcgatgatgatggtggtgtctttgttgatcacaacgcgttttgcctgacccagatcttccagagtggttttttccagttccagaccgatctcttcagaaataacggtacctgaagtcagagtcgcgatgtcttgcagcatagctttacgacggtcgccgaagccaggtgctttaaccgcagccactttcacgatgccacgcatggtgttaactaccaatgttgccagcgcttcgccttcaacatcttcagcgatgatcagcagtggtttaccggctttagcaacggcttccagaactggcagcatttcacggatgttagagattttcttgtcagccagcaggataaatgggctttcaagttcaatagaacctgtttctggtttattgatgaaataaggagacaaatagccacggtcgaactgcataccttctacaacgtccagctcgtcttgcaggcctgagccttcttcaacggtgataacgccttctttaccgactttttccatcgcttctgcaatcagtttacccacggtttcgtcggagtttgcagaaatagtacctacctgagcgatagctttagagtcagagcaaggtacagacagttttttcagttcttcaaccgcagcgataaccgctttgtcgataccgcgcttcagatccatcgggttcatgccagcagcaacagctttcaggccttcagtgatgatggattgagccagtacggttgcagtggtagtaccgtcacccgcagcgtcgttcgctttagaggcaacttcttttaccatctgagcacccatgttctcgaacttgtcttccagctcgatttcacgcgctacagaaacgccgtctttagtaatagttggtgaaccgaaagatttgtccagaacgacgttacgacctttagggcccagggtgactttaactgcgtcagcaaggatgtttacgccgcgaagcattttaatgcgtgcgtcgttaccgaattttacgtctttagctgccattggtattttcctttaaactcgttcagttcagaagatagtgagagcgcgattacgcttcaacaattgccagaatgtcactttcggacatgatcaacacttcatcgttgtcgatcttctctgacttcacgccgtagccatcgttgaaaataaccacgtcacctactttcacatccagtggcttgatttcgccgttatccaggatgcgaccattgccgacggccagaacttcaccacgggtagatttacccgccgcagagcccgtcagaacgatgccgccagcagatttagactcaacttctttgcgcttgacgataacgcgatcatgcaatggacgaattttcattgatagctctcctttgagaaggtccgtatcagatttaggattgataccggtctgccttcataaccagtaccgtgggtttctaagtggggacgtttacccatcccttcaagggataagacaaaaaatttttaatttttttgtcttaaaagggcaaactaagctaactcagccccactgcgaccacggtcatattcaccatgtgattttatttttaaaaaacatagcattataaaatttcgttgcgcttatttatcgtctttgaaacggtcatcgcgagaacgatcgctttcttcgtcacggtgttccacgtggaagcggccatcatccttacgctgaaattcgccgtcaaaggtattcccgtccgccgtcgggccggtgctccttgaacgataaatattcaaatgcggcatcagtttcaaagtcagggacttttgaattggcggcaacagcaataataaaccgaggaaatcggtaaagaagcccggtatcaacagcaagaagccagccagtaccagcgatacacttttcaccatttctgcagcagggctttcacccgcagccagcttttgctgcatttgcataaaagttttcaccccctgattgcgcaccagagacacgcccacgcaggaggtaaaaatcaccagcagtaaagtaaccaacacgcctaaagcggctgccaccttgataaatatcgatatttctatgtaagccaataaaaatatcagcatgaacggtaaccaacgcaccgtattctccttattcagctcatctagcttccgtcgagggccgaatcagggcacttcagacgaaaatcatgagaatgggggcaacgccgccgcggcgcattatgcctactacactaacgtggtggtgcccatgacatttttcaagcagtccactctcttttattaaggttttatctaactgtgagaacaatcacagatatcaaatcctgttgattaattaccaccatatagtgatctgagttcaaggcatttatctataagcagcatatgatcgtggcagcaataagttgaacggttaatccttccgcacttgttgcccacggcgacataaattattcaacaagcaaataattagacagcacaatagagaaggttctcatgtcaaataacattcgtatcgaagaagacctgttaggtacacgagaagtccccgcagaggcttactacggtgttcataccctgcgtgcgattgaaaacttctacatcagcaatagcaaaatcagtgacgtgcctgaatttgtccgcggtatggtgatggtaaaaaaagccgccgcgatggctaacaaagaattacataccatcccgcacaaaattgctgacgtcatcattcgggcgtgtgacgaagttctggataaaggcaaatgcatggaccaattcccggtcgatgtattccagggcggtgcaggtacttcattaaatatgaataccaacgaagttctggccaacattggtctggaactgatggggcatcaaaagggtgaatatcagtacctgaaccctaacgaccatctgaataagtgccagtctaccaacgatgcctaccctaccggttttcgcatcgcggtttacgcatctatcatgaaattgatcgatgccatcaatcagttgggtgaaggcttcggtaaaaaatccaaagaattcgaaaccattctgaaaatgggtcgtacccaattacaggatgctgtacccatgactctgggtcaggaattccgcgcattccaggtattactaaacgaagaaaccaaaaacctgcaacgcaccgccgaactcctgctggaagtgaatctgggcgcgaccgctatcggtaccgcactgaacactcctgaaggttattccgaactggccgtgaagaaattggctgaaatcagtaatctgccggtagttccagccgaagatttgattgaagcgacttctgactgcggcgcttacgtaatggtgcacagcgcgctgaaacgcctggctgttaagatgtcaaaaatctgtaacgacctgcgcttgttgtcttccggcccacgtaccggtttgaatgaaatcaacctgccagaattgcaggcgggttcttctatcatgccagccaaagtgaatccggttattcctgaagttgtgaatcaggtttgctttaaggtgattggaaacgacacttgcgttactatggcggccgaagcgggtcagctccagttgaacgttatggagccggtgattggtcaagcgatgttcgaatctatccacatcctgactaacgcttgctacaatttgctggagaaatgcattaatggcattacggcaaataaagaagtttgcgaaagctacgtatttaattccatcggtatcgtaacttatctgaaccctttcattggccaccataatggtgacatcgttgggaagatctgtgcggaaaccggtaaaaatgtgcgggaagtcgttcttgaacgcggcctgctaactgaagccgagctggatgatatcttctctgttgagaacctgatgcacccagcctacaaagcaaaacgctataccgatgaaaacgaacaataaaataaccatccggtagcccttaaaggcacgctagctcccctggacagcgtgcctttttactttctgacaaacacaactttataactttttattttcatttcattcaaggagtaaacactatgatagccgtagaattagtcattgttctgctggccatttttttaggggccaggctgggcggtatcgggatagggtttgcagggggcattggcgtattggttttagccattattggtgtaaaacccggcagtattccctttgacgttatttcaatcattatggctgtaattgccgctatctctgcaatgcaggtcgcaggcggcatggattatctggtacagcaaactgagaagttgctgcgtaaaaacccaaaacacatcactattctggcgcctctggtcacctattttttgaccatttttgccggtacagggaacatctctctttccgcattaccagtgattgctgaagtggcgaaggagcaaggcataaagccttgccgtccgctgtctacggccgtggtttcagcgcaaatcgccattacagcatctccgatttctgccgccgtggtctatatgtcctcggtaatggaaggccacggagtcagctatttacatctactgatgatcgttattccctccacgctgtgcgccgtattcttaatgtcgctgatcgtgtcatggtgctttaactccaaactgtccgatgaccctgtttatctgaaacgcctcgaagaaggtttggtcacgctgcgcggcgatcaggtcaaagtgatcaagcctcgggccaaaacctcggtattactgttcctgttgggcgttatgtgcgtggtggcttatgccattatcaacagcccaagcgtcggtctggtagaaacgccgctgatgaacaccaccaacgcgattctgattatcatgctgagcgtcgcgacgctgaccacgctggtctgctccgtggatacagatgccattctcaactccagcacgtttaaagccggtatgagcgcctgtatctgtattctgggcgtggcatggctgggcgatacctttgtacagcacaatctggtatggattaaagaaacggcgggtggcctgattcaggctcattcatggttgctggcagtgattttcttcttctgctctgcgctgctgtactctcaagctgcgactgccaaggcactgatgccaatggcgatggcgctgaacgtttctccactggcggcgattgcttctttcgcagcggtttccggcctgttcattttaccaacctacccaacgctggttgcggcggttcaaatggacgataccggcaccacccgcatcggtcgcttcgtctttaaccatccgttctttattcccggcaccatcggggtcgcgctagccgttgtattcggcttcgtgatgggcggtctggttctctagttctccccgagggcgccccgtgcgccctcatcaatcccctcttatcccgctgcattaatctccatattggataaatcatcttcagacccgcccctccttcggggtatagtgcatgactgtcagcttttcctagcgaggttagaatgtctgattctgatgtgattgtcgtactgtgcaccgcacccgatgaagccagtgctcaagatcttgcagggcgagttctgggggaacaactggcggcctgcgctacgctgctgcccggcgcaacgtctctttattactgggaaggacgtttgcagcaggaatacgaagtacaaatgctattcaaaagcaatagcacccatcagcaggcattactgagttttatcaaacaacatcacccttaccagacgccagaattgttggtcttgccggttcgggatggagataaagattacctgtcatggctcaacgcttctttacactgatactgctgctatgcagcgcgctactggcacctcaaagtgctcaggcatctctttttagccaaaacggtcagagccgctttttgccggtcgatcaggcatttgcctttgattttagacaacagggcgagcagctcgatttaagctggcaaattcaccccggctattatttgtatcgccagcagatcaagattgttccgcaacaggcgactcttggcgcggtgaacattcccgcaggccttgctcatagagacgagttctatggcgaagtcgcgattttcaaacagcggctggatttacagatcccgatgattcgggcagagaaaggagccagcgtcagcgtgacctatcaaggctgcgcggatgcgggattctgttatccgccggaaaccagaattgtaccgctgagcgccattgtcgccacaccgcacaccgcagcggaaacgcctgttacgccgccggcacaaaccgaatctgaaccggcctcattgcctttctctccactctgggcactgttgattggcatcggcatcgcttttacgccgtgcgttttgccaatgtatccgttgatttcagccattattcttggaagagaaaaaccccatagccaaggacgaatatttgttttagctatggtttacgtccagggaatggcgctgacttataccttattaggattagtggtggccgctgccgggctacagtttcaggcggcgttacagcatccttacgtgctgattgggctgtcggcgctgtttgtactgctggcgttatcgatgttcggcctgtattccctgcaattaccggcttccctgcaaacccgtttagtcgagtggagcaaccatcaacgcggcggttccctgttcggcgtctttgccatgggagcgctagccggattaatttgctccccctgcaccactgcgcctctcagcgccattttgttgtatatcgctcaaagcggaaacatgctggctggcggcggtacgctttacctgtacgcgctggggatggggattccactgattgcggtcacgctatttggcaaccgcctgctaccgcgcagtgggccgtggatgcaatacgtgaaagaagcgttcggctttgtgattctggcactgccagtcttcctactggaacgcattatcggcgatatttggggcattcgcctgtggagcctgctggcggtggccttcttcggttgggcctttattatcagcttaaaaacgcatcaaggctgggttcgggcgctgcaacttctgctgctggcaggattactgattgcagcccgaccattgcaggattgggcttttggtcacagcgctacgcagcaaacgacgattagccatctcaacttccagcagattaataacctaccggaattacaggaagcgctggcaaaggcgaaaggtaaaccggtgatgttggacttgtacgccgattggtgtgtagcctgtaaagagtttgaaaaatacacctttagcgatcctaaggtgcagtctcaattagccaacacggtgctgctacaggccgatgtgacagccaataatgcggaacacgccgcaatgctgaaagcgctcaaagtgctgggattgccaactatcctgtttttcgacgaacagggaaatgaaatgacgccgtcgcgggtcaccggttatatggatgccgaagcttttttgcatcatttgcagaatagccagcggtaatccacactagcaaaacaccgatgtggaaggagaagcaacgtgcaacgagaagacgttttgagcaacgccctcagcctgttagagcaacgaggcctcgcaacgaccagtctggaaatgctggcagaaaaattatccttgcccgtcagcgaccttcaacgtttttggccagatagggaagcgttgctatacgattgcctgcgctaccacggccagcaaatcgacacttggcgtcggcagctacagctcgacgaaagcctgacgccacagcaaaaactgctggctcgctaccaaacgctgaatgaacaggttcagcaacagcgttatcccggctgcctgtttatcgccgcctgtagcttcttcccagaaaccgaccatcccatccatcaattggcggaacaacagaaacaggcctctctgcaatataccgaagaattactgcatgaaatggatgccgacgacgttgaaatggtggcacagcaaatggagttaattctggaaggctgcctgagcaagctattaatcaaacgtcgaccgcaggatgtggaagtggcaaaacgtctggcggaagacgttctggccgtcgcccagtgccgcaaaaacggcgcgctgagttaagttcagggccagcggctttgcatctatcgcgctcaacccgcattatagtggccctttattttcagtaagactcatagagaattcagaaatggcccaacaaacctctgttgccgaagtgatttattaccacggcgctgtttatactgcggatcgagataatacgatctgtagcgctatcgctatcgggcagggttatatcctggcaactggcagcgatgacgaggtactacgcctcgctactccagaaactcagctaattgatctgcaaggcaagctgatgatgccaggactgattgacagccatatgcacccgttttggggcggcaagcagctacgcggctgccacctgaactatgcggcgctgaccgttgaacagacgctggcgttcatccaacaacatttggatgccgatccaagtcagggggataccgactggctacccgtgcgggcgtggcagcgtcaggccatgattcctgtcggtgcagatatgagccgtgctgcgttggacaccttaaagactcgccgtccggtggtgctgttttccaacgactgccacaccttggccgccaacagccgcgcactggaactgttgggcattgatgaaaataccccaacgccgtccgatggcaaaattgcccgcgatgagcagggaaaactgaccggaattctggaagatgcgcccgcaatgcgcgctttcgacagcattccttccggctcgcctgagcaaaacgtgaataccgccgcctatgtgcaacaggttttaaatgctcagggcgtgacaacggtgatggatacccgcgtatttgccgaacaattatccgcattcggcgcactgcgcgatcgtggcgaactcacgctgcgactgctgggtgcaaaagaagtcactcccgacagcctgaaagggccgcaggatgccggacgagccgttgatgaaattgtcgaatttggtcgccaatggggtgataaaaactggacgccagaaccaggtttggccgttgatcacgttaaattatttatcgatggcgtactccagccgccgacaatgacggcctcgctgctggaaccctatcgtgaaaatcgcggaacagccgagcaaccagactggcagccaaccgaacgttacggtgacctgtactttacggctccggtggtggacgccctgatggtggaatgtgctcgcgccggtatgcatcctcatacccataccgtcggcgacggtgccattgaaatggtactcaacgccgttgagaagatgcgtgaagcttatcctgagaaggatattcgtccgggcctggcacacaacgaattggttgcagcccatcaatacgaacgttttgccaaactgaaagcgacggcggtgctgtcattccaatggtgtggtttgccgggagtgttgatcgacgaagagcgggaaatgctgggagaagcgcgtttccagcatatggaaccgaccgcccgtttcctcgatgcgggcgcgcgtctggcttatggcagcgactggccgattgatcgtctggatgagtggtataaccttcaggtgggaatgactcgtcgcgcgtgggatagtgaaggaaacccggctggcccgcgtttagataacgaccgcgatttgacgttaatcgaagtgctgcgagcggcaactattgacgctgcctatatgattgccaaagaacaatacattggctcattggaagtcggtaaatttgccgatgcaattatttttaaaaataatctgtttgaacaaccggcggaaaccatttatcagaccaaaatcgaaaaaacgctgatcggtgggaaaatcgtttaccaaagttaatctaaccttataaaaaaggggcagtgctgcggcgctgcctttttattttaggccattaccaccctttattgaacattatcactttgtatttcaatagcagaatataaatgccggtcaagttaaccaaaaacaccactttaggatatctattattaacattgattaattttatatattcccaataattagaaagaaataatcgcgttatcgccctcctgcgctaaattaaaattcatcgtatttacccgaaaaaaaccgcggccttggctattattactctccgtactcacgctgagctttccaacccgtaccccctgtgtcaaaatccgctccctttttatatttgaacaccagaacgacggtatccgttgataccaggagatgatagggtaatgccacaaaatattcagttacgcagagttcttaaaacgccagccttggtcgccttcggccttgcttatatggttccgctgggcgtattcaccacttacggtcaggtgacggttctcagtcatggccacttacctatcgcttatctcatcacgatcatcaccattttatttactgctctcagctattgtcgtatgaccagcgcgctcccgctggctggctctgcctattcttacgtacagcgctgttttggcggtaaaaccggttttctggtgggttgggcgcaaatattggattatctgttcctgccgatccttaactatttagttttaggtatatttttacacgaagcattcccggctattcctgcggcagtctttgtcctgggttcgatcgtcagcgtcagcttgctgaatatcctcggcgttcgcttgctaacgtcggttaatttctcgctgatttcggcgcaaatggtctttatcgttctgtttttggcactatcgttcagccaggccgatctcagcccggaagcactgttaaagccgctgttggtgggctcatctgacttttccggtctgttatccggcgcggcggtgctttgtctagccttcctcggttttgatgccatagcgaccatggcggaggaagcgcatgacgccaaacgcacgctgccacgcgctattctgattaccgttatcgcagccggtactatatttatggccgtttcttatgccgctcaccttatctacccagactggaaagcgctgattccggtacaagataccgccagtttggtgatatcggaaaaagtaggcggcaagtggatgtacaccttctttatggcgacctatctgaccggcgtatatgcctctgccatgacggctcagaccggggtttcacgcatcttttacgccatgggtcgtgaaggcgtgctgccacgcaaaatctttttccatcttcacacacgtttccacacgccttatcgagccatcatttttgtcgcgattatctcgctctccgcactgttcctcgatttgagcatggtggtatcaatgattagcttcggcgcactcggcgcatttaccttcgtgaatctcagcgtggtcaaacacttcctgatcaatgagaaacgccgcggcaccagcgccatgattaagtatggcctgctcccgatgatagggtttgtgatgtcggtgtggctttgggtcaatctggagccagacgcactgaaggtaggattgatatggttggtcattgggtttatctatctggtttatctgaccaaaggcctgcgccaggcgccgccttctgtcgatcatgatgacattgctcacctgatagattaagttttcccattgaaccaaacagataggccccgcattgaccgtgttcaagcggggcttatttcgtttatatgactcattctcgctgtggaaaaaaccggaatgttaaccagccgtcgaattacacatactgatgcaccttactttgtcgaagtagacaaactgtatgaaagcgccttcccccgccatgaaaaacgcactcctaaagctaaaaccagcgcgttaaacaacgataattatttgttacttgcctggttcgacggcgaactatttgtaggaatgattggttcatgggcgtttaacggttatacctatattgaacatctggctgtcagtagccagcaacgctcgcagggatacggcaaacgcatacttgagcaatttatacgacagcatccggtgattattctggaggtcgacccactgacgactgaaatcgcccgtaagcgcctgcgcttctatcaaggactcggcttcgtagaaaacagcttcgagcaccgccacccccgctatcatccggatcttgacgatcacgaactggtggtattgagctacccagaaccaatcagccaagctctttataatcaatttaataatgagcttatcaacatcgtaatgggcaacgtgtcgtccctgagattttgagaaactcgcggcactatgtcgctcagcgcccaacaatgagcgataatgcatcaaaaccagctaaaacgctgaaacattaggcaggcaatcaagaagtggaaggatttacattgacgagccaacggtaatcgagtttaatacgccccgttgcccggatagctcagtcggtagagcaggggattgaaaatccccgtgtccttggttcgattccgagtccgggcaccatatttagagaaaccagcctacggctggttttttgctttctggcatctggactcttcatcgaacacgttcgattattcgagccaaaggctctcacccctgcggggccgtcgcaagcgacgttcaaagccgcctagcggcgttgtccgagtccgccaattactctatcgacactgaacctacttcagagtgacccaatagatattggtttttaattcagcagaattaagaactctactatctggaaatacagatactgtaacagcaatatgtagtctatatatttgcatctatgaaaccattaatgccattgataaagcccattcttttctgaacggtattgagttggcgacatattgaaataacttttaaaatcctggcagaaagtactctgactagggaacgccatatcctggctgatttcactcactctcagatttgtctctacccgtttatccgcggataaaataagtcttttccaccgtctatatttggataagctcatgcctatttcgctttggccttcaagtcaaaataagatttagagtatccagccacagcaataacgtccgagactttgattcccagatgaatattgacttatacccaacaaaaaatgtcaggaaaacttttaataaaaaaattttttggcataggtcatatcaagacatgagattccctgttgattaaaagaaaaaccaatatattgtcatgaagcgaaaactctctacttcgtattataaatcgaataaataattatgttagcggtttatcaggcagccttaaataccgcatttactctttcttcccacagcattactaccggtaatacactcaatattttcaataaataaaaaatgttattagctgctatatttaaaaaataaaagtggttatcaataagtgacaataaagttcggtagcctgaatagcaagcctgtctatcaatccaaatgagctactgtttttaactgactctcgttataaatacaaacttcatcgaccagaaaacagtgataagcacatcgctggtaaactctgcaatacggctgttgacgcctcagagctataaaacaaaaaaaccctccagaaataaggagggtcagtggaaatgacggaacgttggaggaaaagcccaagcgcggtatctccgccgtgttttacctgtctgaacgctaaatcgcccctaaattcagatataaaccagcagaaaattgtctctcacgcgtttaacaagctgcttctacggtttctacctctctttgtacataaccaagacggatagcatcaagcgcaatcattttctcttcattagtcggaatcacagcggcgatgactttcgacgccttagtggtaataacctgagtagcaccgcactgtaattgagcattcttcgctgaatcggtctcaaaaccaaaaacggccagatgctccaatgttagctgacggatcaacgccgaattttcacccatgccgccagtcaggattaaagcatcaaaccgccgcagcgaactggcgtgtccgccgatatgtttggcaagccgatgtacaaaaacgtttatcgctaaacgtgcccccgcatgcccttcacgataggctttctctaaaacccgcatgtcgccggataagccagaaatgcccaaaagcccggattccttgtttaatacatgatccaaatccgccatattttgtccggttcgatgcgccagataagctagtgccccgaagtccacatcaccgctacgggttcccataactaaaccttccaacggcgtcattcccattgatgtatctacgcttttaccatcttgaatggcgcaaatagatgcaccattgccgaggtgcgcaataatcagaccatagtcctgcttatcaaatccgagaatatcaacggctttactcgccacatagcgataagacgtgccgtgaaaaccgtagcgtcggacaccttgctcgcgaaaataacggtaaggcagcgcgtaaatatatgcctccggtttcaacgtttggtgaaaacctgtatcaaaaacggccacctgcctgatgcctggaaatagctgacgtgcagcctcaataccatgcaaatttgcgtagttatgtagaggagccagtggtgaaactttttttatctcatcaacgacgcgatcgttaattaacactgattcactgaatatttcaccgccatgggcaacacgatggccgattaagacaatagatttatccagtccgcactttgctaactcatcggaaatagctgtcaacgcatcagcataattgcctttacccagttgaatcttggcgtttttatcaattcttaaaaaagaggcttcggaaccaataccgtctgcaattcctgacgtgatggcttcacaattactcaggttcaggactgaaaatttaatcgatgatgaaccgctgttaataaccagaaccgtagggtttaaagtcatgtcattactccgcccatgtattattgagggcaagttgagggcttttagcgccatacttaaactaatttgtagacgatattaagaatggtcagtagaccgacgagagtgacaaagtagttttctgggcgacctctgaatcgagccagcgctggcagtttatggatggcatacatcggcagcagacacagcaatgaggcgataattggtgcccccatggcttcaatcaaatcgaggatattgggattgatatatgccactatccaggtcgatcccataatgaaaaccatgctgatcagatttaacctaccgctggaaactttggttttatcaccctgataaccaaatttaacaatcaaaccatttaggccttctagcgtgccgagataatgcccaaagaaagatttaaaaatggcaaccagcgcaatcaacgaagcggcatactccagcgtaacggagaaagctgactggcctcccgccatggcggaaaaatggttagcgagataggacagtacgggaatattctgtaccttggcctctgccatattctgaggcgatagcgcaaataagcagctaaaagcaaagaacataacaaccgcgaccattaacatgctggctctgctaataatctgagaacattttttctcagtaaaactacgaccgaattccggctcatattcttcacgttttgatacaacaaaagaagaaacgatcggtgagaagttaaaggaaaacaccatgatggaaatacccagccacaccgttaccagtattccgtcatgtccgaacagagaaatatcattgacacccacctgctcaataaccgaggtattccagtaaggaatcaacgaaactgaaataagtaccaggcaggcaataaatggaaataccaggaaactcatgaccttaaccatgagatctttgccaaagtaaatcactgcggacattaatagcagtaatcctaacgccaccaaacctcggtttagcggaaccaactgaagctgattttcccaaaaggtcataaaggtgttggtaatagtaacgccgtaaatccacagaagtgggcagatagcaaaaaagtaaaggaaggtaataacgacgccgccggttttaccgaagtgctcttcaaccgtttcagtaatatcccctgaacaattttttcctgacaaacacaagcgagccaatgagcggtggcaaagaaaagcgattggataagccaaaagcaacatgattaatattggaataagcccgccaatacctgcacgaatagggaaaaatagaacgcctgcgcctatcgcggtgccaaataatcctaaagtccaggttgtatctgacttacgccacgtttttgttttgactggtgttgatatagcattatcgatatccattaataaattccttattaagatattttacgaaatactgcttaaccccgtaatttgtgatactcgtgataaatcaatgttgccgcctgatataatgctgacggtctttttgccggtgatatagtcttttaactttccgctcagtaatgccgctgatgctaatgcccctgcaccttcggttatgattttgttacgttgaataaggtcgatcatacttcttcttatttcatcttcgctgaccaagacaatgtcattaaccagcgctttgactatttcaaaggttgcattacctgggcgcgcgacatcgcagccatcggccaatgttgaggttttacgatgattggtaatactaccgttataataagaggccgccatgccatgaacgttttccgattgtacgccgataatattaatagtcgggttgactgatttgatcgccaaagcaataccggcaatcaaaccaccaccgccaataggaacaatcacattatcgacatcgtaaagatcttcgagtatttccaaaccaatggtcccttggccggcaatcaccttttcatcatcaaagggatgaatgaaaattctattctccaattcaataatttcactggctttggcgatggtgtcattgaagttctctccgtgcagtatcacctgagcagaatattcactggtcgccgcaatttttgatttcggcgcacaatttggcataacaactttgctgttaatgcctaacatggcgcaagataaagaaacgccttgtgcatggttccctgcggaacaggcaacgacaccctgttttttttcttcttcagtaagtgaactgagtttattaaatgccccgcgaatcttaaatgaaccggtacgctgcatgttttcaaatttgaggtaaatctcaccatggcaacgctcgctaaggtaatttgatctcgccagaccggttttatagatatgcccctttaatcttttttgcgcgctaatcacgtcgttaatcgtcatttttaagtcattgtaaattttcatgtttatagccctgatcaataataattcaaagaataatatatataatagggctggatgctacggcacgaaaaactggattaatgtgacggaaatagcaaaaagaagcggttgatatctaatgaacagtggtttatttcaagaaatgcaacggagtcgacattaagagagaaattagttttatttatctgaaaaggtgaggggaattaaatttcacttaaaaaacgtttataaccaaataaaatagacaggaaagcagcggaagagagccatgaggtaaggaataagaataaatttaatgaaaatcaaagccgtcaggccaaagttttttactatcataatattttatcgctatgcctcactcaatgttaataaatggttgtgtttatgtttaaatataacaaacctacagttttaaccataaagtcggatagataataaaatgtgataacgatcacttcattattcataaaatttttcagtaaaacacatatcgtcacatgtaaaaacaacggaaatagcacggtataaatcaagagcaatactaaaaacatgcctattcgcttttattcattcacttaccaaattacacaacgcttaacttaagataataaatatatcaaaataaaattaatcaccaacaacagataaccaccgcaaaagtaatgtaaattacatttttcacaattaatttaaaaacgctgtaagaataataaaattaaacacattattatcataagcataaatgagcgaaaaacataaaaataaaatacaaataaaagagagaataggcactattaataacgatagaaaccgatgggaaaactaatgcttgtaaacaatacttataaagcaccccaaaactggtcgttgcctaagtcagaagctcttatttcaggaggaaatgcatctgcatcttcaatatctaaatttgatatacccagactagaagaaataaaaacgctttgtgatcaaggctgcataggtatagtgcctgagcatctaattaaattacaggtatttgctcaagaaaataattgtctgataggtatcaggcccgtggatgttatggcaacagacctgatcaaaaatggatacccaaccaagggttttcatattaagggaaaaagtgctaactggggccctcaggctgcatttatctgcgttaagcaggagctgagcaaactggtagataagccagataaaattgcgttatttaatcaacaaattcaagcctgcattgacgaaggccacgcgcaaaaagtaccgctggaaataactgcagcaaggttagatatcttgatgaagagaaatatggttgatattcagatagatgctaatggtttccccattgcgctggatgcccgaacccccagtggaaaactgtataaatttgagctgataccagtaaaagaacatgcggatttatatttagttcaacatcatggagagaccattgaggtgctggcaccgcccggtgaaaataaaaaaccgctgaccgctgattacgatttattgatgattgcaccacacttacaagagtacggggctaaagataatctcctaatcaaagaggtttcccacgatgtattcaaacgaaacatggatgtttataagcgtcgtcgtcatagcgaggtagttaataaatattttcaggcggaatatcttgatcccgctaaattttatgagcgggaagacagcaatattggcaatgtctcaccgcgaatccgcgcaatgataccacttataaataaagctatggtgggcgagggtgaaccggttgtccatcacagcactgacgcaggcagcccggcaagcgacatagcggcaaatttccccgcgaccttcgtgctaccaaagccactaggaaaattgaatgatatttgcgtgataaaaaatatagatgaatttaaggagttgatcatcgccgctaaaaacgaaaactattacattccggtcaatccactatggccaaatgaagtgacaaaaatacgtagcgagagtttttcctccgttattcgacgttttagtcgttaaagtaataaatacggatgatttctaaccttttatatatgacgtctattttccaaggcgaatttttttatttattcgcaggtttttcgcacattaaaagccaccttcaaagaaggtggctaaccgacgatgaaattacttcgctgggcttagggtaaatatttttgggtttcttcctaaccattgagcggctagtgcattgacctgttctggcgtcaccgcttccaactgctctgcctcttgagccagcagggcgaaattgccgtcatcactaccaacctgagccaaggcatcagtccaataactggcactgtttcgcccttcttcctgctcaattcgccaagcttttttggctttactcagctctagcggactgattccttcttctgcaacctgcttcagcactttctgcgccaactgcgccatttcttctgccctttctggcgcagaggtaaagttcaatcgagccaaataataaggcgttggcaacttggctaccatttggctaaagcccagagtataaacgccgctggcctgttcccgcagcgcatagcgcaagcgtagagaaaccactttatccatcagttgtaaggctagctgattcggctgtgaccagaccgcatacgatgagaattgcatactaaccatagtcttaggactactggctaatgggtagtccttcgacattgcacgattcagcggcttaatgcccaaatcacgccaatgtagtcgctgctcggtagcaggaatacttcccatccaacgttccaccagcgtttgcaacttcccttcatccaaagaaccgctaatagttagtgtcatatcctgcgtggcggaaaatagctgacgatggcgttgctctagcccttttatattaaagtcgcgccacggcccgttagctgtcaccaataagcgatccccatgttgatagccttcctgagtcatgctatcgagaaaacggcgctctaccggttgcttatcaatgcccaaagcataggactgcttctgccgctccagcttttcgccggaaaactgaggcgcagtcattttcaagtgcagcaattgcaatagggattccaaatgtgccgctggcgcagagccgcgtaaaccgtggaataacatctcgtcgtaaggcgtcagcgccaaatcctgctgtttactcagttgagccaactggcgcgagctgtattttccgtaaccgctggcttccggtaagcgcatcgcccagctaacctcactgacctcattctcatcttccaacgaacgcccaccgggaatacgtaatgaaatctgcacattatctttcattcccgcgtccgatttaacgatcacccgcattccgttgctcagcgtccacagttgtgtattggcgataggcaaaatctggcgctgtacaaccctcccggccaccggcgtatctagcgttaaagtcaccgctttgggttttagggtgaaagcgcccagctgggtttgacgagttgcgttccacaacgccgcgatagctttactatccacctgttttttatccgtatctggaccaattaaagctaatcgtactgaagcggtatccagcaattccgccacctgcgcctgaacgtgctgcgggccaatcgcggccagccaggtttccgtcattgctagctgctgctgtttatccagcatcggtaaattgagttcaaccgccgtagtaagattatctgcaagataaccaggctgataacggctttcaccggcagcctgctgacgcagtttggttaatatttgctgacgcgctgcattcagttcttctgcactcaccggcgtgctggccatgcgctgtagctcggtaaatagctgtttcagcgttccgttgtaatcactcccctgcgggcgagcgattaataaatgctgaatacgctgattatccagcaaagcgggctgctgattaatgctggcaaccgagagcatctcgttatccaccagcaatgataagcgctggttaaagatggtcagccacaaagtatccagcaaatctcgccactgaccgttagcgctatttaaggaaaccggcaaatcacgctgtaaccccaactgaataatgcgcgagccttgttctgcatcgaataattcactgattaacatgccaggctgaggcgcaaatttcttccaatctggattatcctgagccaacggctgggtagcaggaacggagaataacccagtaatttgtttacgcacttccgtagatttgaagtttccgacaatcaccagagccattcgctgcggctgataccattgttgataataagccacggcttcagataccggagcatgctgtaccacatccagcaaaccaataggatcgcgttgtgcatagcggctaccgtaataccgtagttgctccagtgactggttaatacggaaacccacgccctgacgcaaacgccactcctccacaatcactggccgctctttatcaaaagcttcgggttcaaaactgatacctgtcgcccaatcggacaaaatccgcagcccgagctgaatttgcttttcctctgcgttaggcagagaaagcttgtaagtcgtggcattcagactagtcactgcattaacgtgacttcccaaggtaataccttgtttttctagtgatttaaaactggaagtgccggggaaattacgcgtacctttgaacgccatatgctcgacaaaatgcgctaaaccacgctgtttttcactctcttgcaatgaaccactgttcaccagcagccgcatttccacgcccggctgcgatcgcgctagcaaataaacctgtaggccgttatccagcgtgaagtgctgcacatcactgcgaatcggcaaagactgcccgtcagatagctcggtttcacgggttgtcggcgcgcagcccaacaatacgtagacaagcgacacaagcactagtcggttaaacatggtgtagcaactccttgagaaaaaacagattttacatccaggtacaagcgatggtcggcgagatcggccaggaatgtctggtgacttaccagtaaaatggcgctgtgcggcaacgccgaacgcagcaaccgcagcagatggcgcgcgctggatgcatccagcgccgaggtggtttcatccaacaaaatcaaccttggcttattcaataacaaacgggcaaacatcagccgctgctgttcgccgccggaaaggcgctgttgccacgccgtcgataaggccaattgataaatgaactgcggcaaaccaacctgtgtcaggacgtcccgatactgttcatcgctaaaagcactgcgatccgctggatatgccagtaaatcgtccaatcgctcatgcgccagatataaccgctgcggcagccagctcacgctggcgctgcgggtaatctgcccgcggtaatgtggccaatggccgctgaatgcacgtaataacgtggatttaccaatgccggatcgtccctgaatcagcgtcaggctacctagcgcagcctctacgaggatgcctcgcagcagtgaatttccatcggcagtttgtaaattcaagctggcccgtagcggcatcgcgtcgtccgaagccgtttctaccgggctggacggctccgcttccagcagcaccacaaagttatacaatcgggttacggtggcctgccaggcggcaatgtcccgataggagaaaatgaaccagcctagagcacccgccacctgagcgaatgactgacggatttgcatcaatccgcccaataacagttcaccggcgaggaattttggtaacgcgaaaaaaatcggcgccaatgcgctaagctgctgataaccgacggtgaagaacgataggtttttctcatagcgaatcagctgataccagttatcggcaatggcgtgaaaacgctgtagcaaagccgctcgctcgtgcaattcgccgcgttggccagcaatagcgtcgctggcttcccgtcgggcaatcagcccactgcggtaatcggcctcacgacgctgtttttccatattgagctgacgcagcggatagccgatccagtgggtcaggccaatgccaatcaaggtgtagaaaatacacacccagaacatgtaaccaggaagggtgaaactgtgggacggcagggaaaaattcaggctgccagagagttgccataaaatggcggcgaacgacaccagcgtcagcatggaatgcaggaaggtaatcaacagacgcaggctagattcaatcagcaaacgcacatcctcggcaattcgctggtctgggttatctggctccaatgcgttgattttcagtgcatagtgttgcccgttgcgagaaagccagcgtgccagaatatattcggtcataccgatacgccaacgcatgattagccgttgcttcaaataatccgcaaacaccaccaccagaatcaaagcgctaaccagcacgataaaatgctggagtaactgatagagagcctggctgtttagctgctgtagcgcattgtaaaaatcgccgttccactggttaagacgcacattaaaccaaaccgatgataggctgagcaccagcactatcgccaatagcaaccaggcaaaccatgcggtgccaacgccccaaaaaggcctagcgagataacagaactgttttaacgttttcatcaatcaaccgatcttgtactgacctaaaaaccaaaacgtctggctgcctaagccgcccgactgcgttcagtgacttctcaacataattacaggtcgtaactcagttgcagccagaactggcgccccggttcataggagtgcaacaccttgtcttcatacacaaaagtgtccgccacgttgcgtttgttcagtacgttattcacctcgaccgagatccccgcaccataggcaaaatcaggtttccaggtcactttggtgtcccagcggtaggtgctggcaaagtgggtcttctcgtacttcaacatctgcgaaccggtggtcggatcggtgtaataatcttgctggtagcgtaccgcctgatcccgcgggccacgccattgcagcaggttatagaaggtcaggttgtgttcctgccaatcactggtcagctccagattgaagcgccacggcgagttaaagttggtggagggtaaatcggaagcgttaatcaccttgccgtcgtaccagactttatccgaatccagcttggtgcttgggtcgaagaaagcgtaaccctgatctttcggcgtattgctcttactttgctgccagctcagggaaccggtcatagcatgagacaacgcaccagtttcccacggctgattgttgctcacggaaagtgaaaccgtatcgttgctgctgcggccgccgttatcaaaggtacgaatgcgcgactgcaaactattaccgctgttcggatacttagtacggctgcgtacctcgtcataaccttcgcggtgaacatattgcaaacgccactgggttttcatgatttgctgttgcagagcgaggcttaactcatcgttataaggcgttgaaagtttatcgataccttcgaaatctttcacgtcgccccactcaacctgattgggatcgcggtgacagtcgtagtagcaattctgcataccggcgttttgcgcttcatacagcgcataggtcagcattgaacgaccatagtaacggttagccccagcgatcagcaccgtattaccagttccgaaaatatccaaactgctgctcaaacgcggagcaatattggtctggccgacaaaatcatcccgatccacacgtacgcccggacgcacggtcaaacggccatactgcatgctgtcgtcaaggaacagggcgtagctggtgtaatccgctttataggttcccgcgcgaaagcgggtgatattgctgggctgagcatctgaagtaagccagtctggcgatccgtagaaccgatagcggtagtaatcccgatcccgttgatagcgcgcctcggttttattaacttcaaaaccaacgtttggcgagtggaacatccccagcgcctcaaattgattaaagcgcagcacccctttcgccgtggcactgttttgtcgggtgatcaagtccccctgcccgccattgttgtaataacccgtattcggccagtttgaataatcttccagggcgaagaaatctttcacatcattggtgcgctcatccaccagcttttggtaaccggcggttaaatccaggttggcaaaatcaaagcggtgctctaactgcaacgtcgtgttcaagccattatgatcgttatcgtagcctgaattgattacgctgctggaaaagagcgagctggtataggccgagtaattgccggataaatgcaggctggtacgctcattggcatcccatgagaacttggcgaaatagttatcagacacccgtttctggctgcggtagccgccgtccattgagacgccttccagctcattattcggccctatctgtaaaccgctgccgccgctggtataagtcggaatatccgaaatacgatgcgaggcagaaaagactacgcccagattatcggttatgcccgcttcaaaccaacccccgaagttctgtttactgtatttcggctggaagcgatctggccgactggtgtcattctttgagctgtcaaaagcggtgccgggatcggtaaacaccttgttccacgccgaacgggtttcgcggaaatataaatgtgcgctgttatcaccacgccagcgacggctggtgacatccagcgtaccgccggtaaaaccaccatattccaccggaatgttgttatcgaacacagtcacgctgtcgattaaacggctatcgagataaatcccctgatcgctgctgtcaacgcgggtcgtggtttcaccattgccactgctggccggatcgacgtcgttgttaaagctcacgccatccagtttgtagttgttttggtagctggaagaaccgtggatagaaatcgcactcggcttgatttccccttgattgagactggtgttaccgctgttagaaaactgtaccgccggattggtacgcaataattcggtaatgttaccgttgccggtagtgcgctggcgaatctcttccgaagtaatcacctgcggggctgacatcagattatccgctgcccgaccgctggtttcccccatcacagaggtagtcggaagaataatagcgccggtgttagcacctttcatcgtcggtggacgaataacaaaaccgctaccgctgctaaccaactccaggccgctgcccgccagtaattgctgcaacgcagactgcgggctgtaattaccatgcagagcgggcgctcgcaggttacgcagctcggattcatcgaataacacatgcagttggccttgctgcgccacattggcaatagcgttggctaacggttgctccgccatattgagctgtaaatcggcggcgcctgccccttgactcatcagcagcgttgccagcgccagggcagaaagaacaggcatcccagaaggtttctttttgttgtaagtcatctcgcaatttcttccctagaaaataaaaatgccttgccaatgggcagaggcatcagggaagacgagagaatgagaattatcctcacctatgaaatgaattattttttacttttgctgcgggcgcggcaaaatcaacgcgttaccctgagcgtcctgtacaacattcaccgccaaaagcagcggtaaagcgtttaagaactcatccggattagctaaatccagcgaacctgaaaccggcagcgatgccaagcgcccgtcggtcaactcgatttttcctgaccgatagcgcgccaactctttcagtagctcgcccaatggccgattgcggaatgaaatttgcccactacgccattcgccgacttcattcacctgccgctgacctcgctgtagatcgttttcccctttcagcaagcgcgctgaatctccggcatgcaacatcacggtttccatagatggccgcccggtgaccgctacagtaccttggcgtaccgccacccccatttcatcagcgtcatagcggacgtcaaattcggttcccacgacccgcacctgactttctccggcatagaccaaaaaaggtcgctgcttatttgccgccacctgcaaatacacctcgccatgatccagccagagttggcgttttttcctagcgtagtgaacacgcattttagtatatcgattcaaatgcacgcggctgccgtcggacagcaccacttcacgagcataattatcggtttgcagatgaatatcgtgcatcagcactagcggcaactgactggcaggcaaccacagagcaagcaaaaagaaagccccagcggcacaggcgcgcagcggacgccaccagctcggttttgccttaggctgcgcagcactcgccgggcgcgtaatcagggcacagtccccccagatttgctgcatctgtcgaaaagcctcagcgtgagccgcagagcgctgtaaccattcctgaaattgccgttgttccgcatcgttaaggcgacgcccctggctgcggctaaaccacagcgcagcctgttcgtcgatttctgtttccagaaggcggctagcgtccgtcattgtgctcactctcctgttccgctacgtagcgtttacaatgcaccaaggcaccggcaatgtgcttttctaccatactgacagaaattcccattctctcggccacttcaatttgcgataaaccgtcaaagcggtgcattaaaaaagcctcccgacgacgaggagaaaggctttgcaacgcttcctccagccgatttaaacgctgttggtgttcgaataaacgctgcggttcggtttctgtcggcgcaacttcctctctacctaggctatcttcatgattttcagacaataatagccgctgctttccggtagcacgccaatgatcgataagcacccgatgagcaattttgaacaaaaaggcgcgcgaatgctccaccggtgtttgcctggcacgtttcaaccacagtgtgaatacgtcctgtgacaagtccttggcatcgctggcgttatccactcttttacgaaagaagctaaccaactgaccgtaagtggcctgataggccaaactcaccctgtttgatgggggtttatccatgaatgcatccgttaaagtcgcgcggtccttttgacctgtgccgttcaggccagcataggtattgaagccgtcaggtacatcaatccggttgcccacatctggctgtaaaatagcgttccacaattttctctgctgattcggcggatactcgtaggccccgctcttctgaagctggcggttataagcaaaactcggaataaatgcaaatgataatgcctataactatcaatatgcttattgttacgtataatccgcagcttggctgtcggtgttattgagtgcagggaaagtgataaatatcatcggcacggcatgggcagccatttataaaaagggtttataatcaataaaataacgccgagaatacggcgttcgcggagtcggtaatgaaatcattctacccacagccagcccatagccacggcccaaccactgcagcggctcactttacaccacacacttttggaccgccggaaggcaacccgcgcacccgctggaccgccagtttactgctgggcttagcgctacatttactggccgcagtgttaatgctgggctggtggaatcggctttcacctcagggcgcgttgccaccggcagtaatggtagaaatggcgatttttcagcaagctaaaaccgcgccaactgacgtaccacaaggtgttttgcagcaaatggcggcacctgatgacgttcagccggtcaaaaaggagttgctggagcagccgaagctggcgctttctccccgcggtactcacgcgattcggccggagaaagtcgatagcaagaaaaaaccggtagtaaaaccgaaaccaaccgaaaccccgttgccggtcatagccgaaaataccgcatcaaccaccagcgccccattgcccggttcggccaagaaaaacgccgccaacttttccagcgcttcttccgcggcaatcaacggtaaagccgcatggcaaggggaagtattagcccatatcgatcgctataaacgttatccccgagaagggttacgctatcgtttggaaggggtgagccatgtgcgttttgtggttgatctgaaaggaaaagtgttattagcagagctgatcaccagttccggcgccagaattcttgaccgcgaagctatgacgttgatttcccgcgctcagccaatgcccgcgccaccggcagacattctaaacaacggaactatcgaagtcatcgcccctatcgcctacaacgttaaaggcgcttattagtgagcactgcgcaaggccagaatggtcacgcgcagtagccagtcacctaacaaagccaagggcgtagctacctttgaataagataacgaatggtcggcccatcctgctgaatatccaacactttatagccataattacgtgcatccagcgggatattattgatcgattgtgggcaatcgctgatcacctccagtatttcccctggtttgagctgcggcatggcttccagcgtagcgactgctggatatggacagggctctccgaccatgtctagtcggtaatctggaactatcggttgggtgctcatagtgattccttagataaaattggcgcggcagctttacgactgcggaagaagcgtttttcccaccacaacatggcggcaaaagcgatgcctaataacagataggttatcagcagccctccgattgggccgaaggtgtccagcagattgactttgtcatggtttgtcacgagcactggggcaaaatcatcccagtaatatgccaatagagtggcaccgataacgttgcctaaaccgacccaccagtagtgaatttgcccttctacagcacgatacatccagccggtttcacagccaccagctagcacaatgccgaaaccgaataacaggccaccaatgaccgcatttggccctgcccacaggattttcggcgcaacacccagttgaacatagctaaagataccaatagcgctcaccgccatgccgagaataatggcttttgccatatgggtacggccagtaatccacagatcgcgaaaagccgatgtgaagcaaatctgcgcccgttcgatcaataagccaaaaccaatgccaaatagcatagcaatgccgagtttaggcgcctggaataattcggttaacgcccagcataatgccagcgcgaataccaccatacccagacggaaacggcgctttgcgcgctgaggattttgcgttaacggtgctgctgcgctgactttctgcaatttcaccggaatacggaatattggtaacagcgtaaattttgccccgaaataggagccagccgccgttgcgagggcaaaaaaccaagcgtgtaatgaaaattgaggaataccagtaaaaaatgcagctaaattgcaccccatagccagacgagcgccaaaaccggcaataatcccacctaccagcgcctgagcaattcgaataccgtgttggggcttacgtagcttaatattgttagcccacagcgccgcagcgatacaaccggcaaacatgccgataatcatcattccgtcgatacggtccagcggcgtaccttcgaaacctataactttaaagtagccccactcctgcgggttagcgccgaaccactgcattacatgcccgccccagcgtgtgaactctccggtcacggcccaaaaagtaccggtcaggccaaaatagtaggtcgataagatccctgcggcgatcaccgccggaagcggtgcccaaaatcgcaccaaatattcggatttaaacgactgccaggtcatgcttcctccacgcaatattcatcccccacgcagcgaggtttgttatcgccgatggaataaaaagttaaaaagactcgcaatgataaggcaatttaaacccacagagtatttaatcctgcatagtttgtaaggtttttgtctttcccgccacgcagtggagcagggatctattattgagaaaggaaagttacattggtgcagaacagaaacgtgaacgctaaataatcgggtttatcgaagagaaatagggtagccggtataaaaaacccgcggcgcacattcggcaaaccgcgggcttcgatccagacaggagttaactaaccttggctagctggagtttgttgttccgcgaagaaagatttctcatattctcgggctttcttccgatcaaactggtgttcccacttggcaatcaccaatactgccagtgcgttacccacaacgttcaacgcagttcgcgccatatccagaattcggtcaacaccagcaataaatgccagaccttctaatggaatgcccacgctgcctaaggttgccagcaacaccacaaatgacacgcccggtacccccgcgatgcctttggaagtcaccattaaggtcagcaccagaacgatttcctgaccaatagaaagctcaataccatatagctgcgcgatgaagatcgccgcaatactttggtacaacgtagaaccatccagattaaaggaatagccggttggcaccacaaagctggtaatcgactttggcgcgccgtaggcttccattttctcgatgatacgcggcaaaacggtttctgagctggcagtagaataagccagaatcagctcatctttcagaatgcgaattaacgtccagatccgcagattacaggctctggcaactgcgcccatcacaaccaaggcaaagaaaagaattgcggcgtaaaccaatatcaccagcttggcgagcggaagcaaggcggcaaaaccaaaattcgctacggtcacggaaatcaggccgaatacacctattggggcgtaacgcatgatcatatgtgtgactttaaacatgctctcagaaacggctttgaacacgttaagcagcggctctttggtttcttttggtaaagaagacagccctaaaccaaacagtaccgagaaaaaaataatcggcaacatatcgccattggccatcgaggagaaaacattcgatgggatcagcgatagaatggtactcaccagactatggctaccgctttgtacctgcgccgtggttttttcatactgagaaatatccactgcggttagcgtcgacatatcgatgccatgacccggttggaaaaaattggccaaagtgataccgacaataatcgcgatagtggtgatcacttcaaaataaataatggtcttcaggccaattcgccctaatttctttgcatctccaacgccagcaatacccacaatcagcgttgaaataacaataggaaccacaatcattttaattaagcgaataaaaatatcgccagcagggctgagaatattactgactaaccaatcacgagactcggcctgattatggagaacagcaccaaccagaatacctaatacaagcgcaattaggatttgccaagcaagacttatttttacacttttcatacccaaaaaaatccctcaaagcattccccaaagcgcatgatggacatgcacttcagatggaatacttaatcattaaatacggggctatagttaataaaatccgcggatcggcctcccgccagccgtccaccttttcaatcagtatcatttcaacccgttgttctgcaagccttgtttactctggcttaacccactacgccgagtatcttttggtaggaacaaagagtgataagccataaccaactgttattaaaataataaatttaaaccatagcaaataagcacttcacccttaggtataaaaaataggcgaaattaattagccgataaaatcagcggcttgttgtatttaatgccttattttgttcgcattttgttaaatgggcagtatttcgattttctacctattttaggtattctgcaaccaaagctcccaataaattcattcaaaaatgagaaaaatcatgattaatcgaacaaatctttgctgcataactatgctgttattcttaaactcgttttttatttccattaagaatatctactgactttaaatactattaagtaataataaaaatctaataatcgacttgctctaatcattatcagaattatttttagataaacttcctgccattattgcgaatggattttgtcttaatcgttattcaaacaaagaagtcacctatatacacaatcacggtgtaatacttctttcgctgaaataaatggcacacaggagtatttcatctgatcaaacttcaattctcgattaaatcccttccctattgagatattgatacaccacacagcacatcaagtaagtccctaaaacaacatcttttctgcgtgatctgtcgcccaaaaaagaaacaaaacgacgcccaacactataattaacctttagttgacatattattaacaatctaaaggagaataaatatgagccaactacctaaacacccaattcccgctgcaattgcagaaaatgccctgatcaacccagtccaatatcatgattattatcaacaatctgtacaaaaccccgatgcattctggggcgaacagggcaagattatcgactggataaaaccctatagtattgttaagaacacttcatttgatcctggccacgtcagtattcgttggtttgaggatggtacgctaaatttatccgctaactgtctggatcgccatttggccgagcgcggtgagcaaaccgcaattatttgggaaggtgatgatccaacccaatccaagaacgtcagttataaacagctacaccaagatgtttgccagtttgccaatgtattgaaaaaacttggcgtaaaaaaaggcgacgtagtggctatttatatgccaatggtgccggaagccgcggtagctatgctggcctgtgcgcgtatcggtgccgttcactcggtaattttcggcgggttctcaccggatgcggttgctggtcgtattattgattccaactccaaactggttatcaccgctgacgaaggtatccgcgctggccgcgctattccattgaaaaagaacgttgatgaagcgctaaaaaatccggctatcaccagtatcaataatgtcgtggtcttccaacgtaccggcaaaccgggctactggcaggaaggtcgagatttatggtggcatgacctgattgaaggcgtttcagcggattgtcccgctgaagagatgaatgcagaggatccattattcatcctttatacctctggttctactggtaagcctaaaggcgtactgcacaccaccggtggctatctggtttatgccgccatgaccttcaaatacgtgtttgactatcacccgggcgatatctattggtgtaccgccgatgtgggctgggtcaccggtcacagctatctgctttacggcccgctggcctgcggcgctatcactttgatgtttgaaggcgttcctaattatccaggcgttaaccgcttaggtcaggttatcgataagcatcaggtcaatattttgtacaccgctccaacggcgattcgcgcattgatggccgaaggcgataaagcgattgaaggcaccaagcgcacatcgctgcgtctgatgggttcagttggtgagccaattaaccccgaagcctgggaatggtattacaacaaaattggtaacggtaaatgcccaattgtggatacctggtggcagaccgaaaccggcggtttcatgattacgccactgccaggtgcaaccgagctgaaagccggttcagctacccgtccattcttcggcgtacagccagcgttggtggacaatctggggaatccgcaggaaggtccagccgaaggtaatttggtgattatcgattcatggccgggtcaggcccgtactctgtttggcgatcacgatcgtttcgagcaaacctacttctcaacctttaaaggcatgtatttcagcggagatggcgcccgtcgcgatgaagacggctactactggattactggccgcgtggatgacgttctcaacgtttccggtcaccgcttaggtaccgctgaaatagaatcggcgctggtttctcatccgaaaatcgccgaagcagcggtggttggcgttccccacaatattaaaggtcaggcaatttatgcctatatcacgttgaatcacggagaggagccaacaccggaactttatagcgaagtgcgtaattgggtacgcaaagagattggtccaatcgcgacgccagatattctgcactggacagattcattgccaaaaacccgctctgggaaaattatgcgtcgcatattacgcaaaattgccgcgggcgataccagcaatctaggggatacctcaacgctggccgatccgagcgtagtagaaaaattactggaagaaaaacaatcaatgcaagcaacgtcataaattacaccgccagagagcggcaacttaattaatgcctcacaggagaactctgatgaatgacagcatttatcaagagattgaaaataatcctaaattcaaagagttggtacaaaagcgaggccggtttgcctggctgctatcatcaattaccttagcactctacgttggctttatttttctcattgcctttgaacctcaatggctggggactccgctatatgcaggagccagcatcacgcgcggtattccggtcggcataggtttaatcgtaatttcttttgttcttaccggtatttatgttgtccgcgctaacggtgagttcgaccgcatgacggcagaaattcttcgcgaggtgaagcaatgaagatccgccattggtctgcactttccttactggctctgcctgcgctgtcacaggcagaggcaatcagcggtgaagttcagcgtcaaccgttgaatattcaagctattgtgatgttcttactttttgttggcgctacgttgtatatcacttattgggcttcgaaacgcactcgttcccggcaagattattacaccgctggcggtcgcatcaccggtttccaaaatgggttggctattgccggtgactttatgtcagccgcatcattcctcggtatttccgcactggtttatacctcaggctacgatgggctgatctattccattggttttctgatcggctggccaattattctgttcctgattgccgaacgtctacgtaatcttggtcgctataccttcgccgacgttgcgtcataccgtttgcaacagcgcccaattcgtaccctatcagcctgcggatcgctggttgtggttgccttatacctgattgctcagatggttggtgcaggtaaacttattgagctgctctttggcctgaactaccatgtggccgtagtattagtcggtattctgatggttttatacgtgttatttggcggaatgctggcaaccacttgggtacaaattatcaaggctgtcttgctgctggcgggagcaacattcatggcgttgatggtcatgaaatccgtcggcttcaacttcaatactttgtttagcgaagccatcaaagttcaccctaacggtctcaaaatcatgagccccggaggattggtttcagatcctatatctgcgctatcgctgggtctggctctgatgtttgggacagccggactgccacatattttgatgcgcttctttaccgtaagtgatgcaaaagaagctcgtaaaagcgtgttctacgctactggctttatcggttacttctatattctgacctttattatcggtttcggcgctattttactggttggcccaaacccttcctttaaagatgcggctggcgcactgttaggcggcagcaatatggcggcggttcatcttgctaacgccgttggaggcaatttcttccttggttttatctccgccgtcgctttcgccaccatcctagcggtagttgccggcctaacattagccggcgcctctgcggtttcccatgacttatacgccagcgtaattaagaacggtaaagcgcgagaacgtgatgaattacgcgtctctaaaattaccgtggtggtattagggattgtagcaatcggcttagggattctgtttgagaatcagaatattgccttcatggtaggtctggccttctcaatcgccgccagctgtaacttcccaataatcatcatttcgatgtattgggacaagctgacgacacgaggcgcactagtcggcggctggttaggattgattactgccgtcgtgctgatgatcttgggaccaaccatttgggtcaagattcttggtcacgccgaaccaatctatccatatgaatacccagctttattctcaatgattgtagcctttgtcggcacatggctgttctctatcacggataattcagaaaccggcaagaaagagcgcctgctgttcagagcgcagttcgttcgatcgcaaaccggcctgggcgcctctcaaagcggcggccactaagcattagttttttcaaatatctcaatgtactagaataaaaaccaaggcccttcggggcctttttccatctcattcagtgcgaaaatagcgaaataaaaatcggtcgtgcagagggttagactgatacagataaaatgtagagagaatttataaacgggctgattctacccgacagtaataataaagataaaagcctaaatagccttcagcgcagctgactttttcactgttaagaacgaggtacttttggggagaattacgccacattacctaaaatgtccgcaggataactaactcttcatcaccgctttataatgttaaataaccgagtaatcagcacgatatacgaaggctattgagaataatttatggctcgtgagtggccaatcctgaccgataagtgatgagtgataagtgataagtgataagtgataagtgataagtgataagtgattatcgccggattattggttttcatgataattactttcgaccagcagttaaaaatcttctgtctgttactcttcgcagtgaggccggtagtgtatcagaggcctcagcatcccgactggcgacacgttttatccccttacgccccaccggatgcaagcctggctcttgagctaccgccgagtgtgaatacccattaatgaggatgagtttccgataaaaccgacctggttcgttggttgcatggctttttaataaaatataagcccggtgagtgactgtatctgcctgaaaatgctgcgaatttactgcctgaaaacgtcaacggcggcgcaatttaccggataagccgccccttatggaatgaaaatcgccatatacgccttcaacgcccgacattcccgggggttcccatgcccttaaacgcaaaaagccccccgcaatcgcaggaggctcggttcgagggcggcaatgacttttatccgcctcgcgtctgtcttttttccatagcaaaaaccccacgcttttggcatggggtcttggcttgatttgatgcctggcagtgtccactgtattcgtctcatcttctggatgagactcaccccgctggggccagcgcaggcgcagtttgtcgcatgcatgctcgagtcgcacaccacccaaacgagacaaacaaaaaaggccacccgttagggtagcctcttttgtttatttgatgcctggcagtgtcctactctcgcatggggagaccccacactaccatcggcgctacggcgtttcacttctgagttcggcatgggatcaggtgggaccaccgcgctattgccgccaggcaaattctgtttcaatcaacccgccacgtgatttacaccacacagccagtcaatccaatctgttaacaatgctgaaaatcaaaacgctctctaaaacaccttcggtgttgtaaggttaagcctcacggatcattagtactggttagctcaatgcatcgctgcacttacacacccagcctatcaacgtcatagtctttaacgttccttcagggggcttaaagccccagggaagactcatcttgaggcaagtttcgcgcttagatgctttcagcgcttatcttttccgcatttagctaccgggcaatgccattggcatgacaacccgaacaccagtgatgcgtccactccggtcctctcgtactaggagcagcccctctcaatcttccaacgcccacggcagatagggaccgaactgtctcacgacgttctaaacccagctcgcgtaccactttaaatggcgaacagccatacccttgggacctacttcagccccaggatgtgatgagccgacatcgaggtgccaaacaccgccgtcgatatgaactcttgggcggtatcagcctgttatccccggagtaccttttatccgttgagcgatggcccttccattcagaaccaccggatcactaagacctactttcgtacctgctcgagccgtcactctcgcagtcaagctagcttatgcctttgcactaacctcacgatgtccgaccgtgattagctaaccttcgtgctcctccgttactctttgggaggagaccgccccagtcaaactacccaccagacactgtcctcaccccagattatggggccgagttagaacatcaaacattaaagggtggtatttcaaggttggctccacgcagactggcgtccacgcttcgatgcctcccacctatcctacacatcaaggctcaatgttcagtgtcaagctatagtaaaggttcacggggtctttccgtcttgccgcgggtacactgcatcttcacagcgagttcaatttcactgagtctcgggtggagacagcctggccatcattacgccattcgtgcaggtcggaacttacccgacaaggaatttcgctaccttaggaccgttatagttacggccgccgtttactggggcttcgatcaagagcttcgccttgcggctgaccccatcaattaaccttccagcaccgggcaggcgtcacaccgtatacgtccactttcgtgtttgcacagtgctgtgtttttattaaacagttgcagccagctggtatctgcgactggcttcagctccgagagcaagtctcttcacctagcgccagcgtgccttctcccgaagttacggcaccattttgcctagttccttcacccgagttctctcaagcgcctgagtattctctacctgaccacctgtgtcggtttggggtacgatttaatgttacctgatgcttagaggcttttcctggaagcttggcatcaactacttctgcaccgtagtgcatcgtcatcacgcctcagggttgatggttttccggatttaccaggaatacccccctacacgcttaaaccgggacaaccgtcgcccggctagcctagccttctccgtccccccttcgcagtaacaccaagtacaggaatattaacctgtttcccatcgactacgcttttcagcctcgccttaggggtcgactcaccctgccccgattaacgttggacaggaacccttggtcttccggcgtgcgggtttttcacccgcattatcgttacttatgtcagcattcgcacttctgatacctccagcagtcctcacagactaccttcaacggcttacagaacgctcccctacccaacaacacctaagtgtcgctgccgcagcttcggtgcatggtttagccccgttacatcttccgcgcaggccgactcgaccagtgagctattacgctttctttaaatgatggctgcttctaagccaacatcctggctgtctatgccttcccacatcgtttcccacttaaccatgactttgggacyttagctggcggtctgggttgtttccctcttcacgacggacgttagcacccgccgtgtgtctcccgtgataacattcttcggtattcggagtttgcatcggtttggtaatccgggatggacccctagccgaaacagtgctctacccccgaagatgagttcacgaggcgctacctaaatagctttcggggagaaccagctatctcccggtttgattggcctttcacccccagccacaagtcatccgctaatttttcaacattagtcggttcggtcctccagttagtgttacccaaccttcaacctgcccatggctagatcaccgggtttcgggtctataccttgcaactagacgcccagttaagactcggtttccctacggctcccctatacggttaaccttgctacaaaatataagtcgctgacccattatacaaaaggtacgcagtcacaccacgaaggtgctcccactgcttgtacgtacacggtttcaggttctatttcactcccctcgccggggttcttttcgcctttccctcacggtactggttcactatcggtcagtcaggagtatttagccttggaggatggtccccccatattcagacaggatgtcacgtgtcccgccctactcatcgagttcacagcatgtgcatttttgtgtacgggactatcaccctgtaccgtgcgactttccagacgcttccactaacacacaaactgattcagactctgggctcctccccgttcgctcgccgctactaggggaatctcggttgatttcttttcctcggggtacttagatgtttcagttcccccggttcgcctcgttagactatgtattcatctaacgatagtgcaacgaattgcactgggtttccccattcgggtatcgtcggttgtaacgcttcatatcagcttaccgacgcttttcgcagattagcacgcccttcatcgcctctgactgcctaggcatccaccgtgtacgcttagtcgcttaacctcacaacccgaaggtgtctttcgacatcatcgtgctgcgattattgagagactctacctgcagatgactccttgtctcggtaaatctacggagagacaagttttagctgcagtgtttcaattttcagcttgttccagattgttaaagagcaatatcttaaacacgactcgttaaagtcatctttaagatattcagttgataatgtctttcactcattatcggatggcgtccccaaggggattcgaacccctgttaccgccgtgaaagggcggtgtcctaggcctctagacgatggggacacaggaaattccgactaaatcaaaaacttaatcgtttctcgtgtcatcatgagtcgaaactcacgacatcaacaggtgctcttgctcattactattatcagacaatctgtgtggacactacgcaatgcgtatcattaggtaaggaggtgatccaaccgcaggttcccctacggttaccttgttacgacttcaccccagtcatgaatcacaaagtggtaagcgccctcccgaaggttaagctacctacttcttttgcaacccactcccatggtgtgacgggcggtgtgtacaaggcccgggaacgtattcaccgtagcattctgatctacgattactagcgattccgacttcatggagtcgagttgcagactccaatccggactacgacagactttatgtggtccgcttgctctcgcgagttcgcttcactttgtatctgccattgtagcacgtgtgtagccctactcgtaagggccatgatgacttgacgtcatccccaccttcctccggtttatcaccggcagtctcccttgagttcccaccatgacgtgctggcaacaaaggataagggttgcgctcgttgcgggacttaacccaacatttcacaacacgagctgacgacagccatgcagcacctgtctcacagttcccgaaggcaccgaagcatctctgctacgttctgtggatgtcaagagtaggtaaggttcttcgcgttgcatcgaattaaaccacatgctccaccgcttgtgcgggcccccgtcaattcatttgagttttaaccttgcggccgtactccccaggcggtcgacttaacgcgttagctccggaagccacgcctcaagggcacaacctccaagtcgacatcgtttacagcgtggactaccagggtatctaatcctgtttgctccccacgctttcgcacctgagcgtcagtctttgtccagggggccgccttcgccaccggtattcctccagatctctacgcatttcaccgctacacctggaattctacccccctctacaagactctagcttgccagtttcaaatgcagttcccaagttaagctcggggatttcacatctgacttaacaaaccgcctgcgtgcgctttacgcccagtaattccgattaacgcttgcaccctccgtattaccgcggctgctggcacggagttagccggtgcttcttctgcgagtaacgtcaatcacttcacgtattaggtgaaatgccttcctcctcgctgaaagtgctttacaacccgaaggccttcttcacacacgcggcatggctgcatcaggcttgcgcccattgtgcaatattccccactgctgcctcccgtaggagtctggaccgtgtctcagttccagtgtggctggtcatcctctcagaccagctagggatcgtcgcctaggtgagccattaccccacctactagctaatcccatctgggcacatccgatggcgtgaggccctaaggtcccccactttgctcttgcgaggttatgcggtattagctaccgtttccagtagttatccccctccatcaggcagtttcccagacattactcacccgtccgccgctcgccggcaaagtagcaagctactttccgctgccgctcgacttgcatgtgttaggcctgccgccagcgttcaatctgagccatgatcaaactcttcaatttaagatttgtttgatttgctaccgaagtagcgatgctcaaagattactttctgcaaatatgcattcgaaccgaagttcaaatgtttactgctttggtcactcttcaagacttgatatttcttctgcctgccgaaacaggctttgatatcgtcttgcgagtgcccacacagattgtctgataaattgttaaagagcgttcgttacccgttcgcttgtggcgaatcttacggtaacgcgggaggcagataatacgctttcccgctacagagtcaacaacttaattcgttaattttctctgttctccccggccactctgtgaagttgctcacagcgccgtgtcgatggatgcgcattatagggagctgcttcagaatggcaagggtttatcgtaaagtttattccgtttgctgattatttgcgctttacgcttatttaacccgcattttgatggcttttggtagttctgcgaggctatttagcacccaatcggccagcgcttcacccgcttcagttacgggtttaccgcttctcaccagaactttagtaccgacattggcagccaatgcggcctgcatgtcttcaattttatcacctaccatataagaagcagccatatcgatgttcaattcttgctgtgcttctattaacatgccaggtaacggcttgcgacattcgcaggtttgacgaaactcgtcgacacttccttccggatgatgcggacagaaatagataccatccaaatccacaccgcgatcggccagtgaccaatccatccattctgtcaggctgacaaactgggcttcggtaaacatgccgcgggcgatgccagattggttagtcactagcaccaaggcaaagcccatttcttttaattcacggcaagcatcaatcacaccgtcaataaactgaaagttatctatctcgtggacataaccgtggtcgatattaagagtaccgtcacgatctaaaaatattgcgggaactggctgcgtcacttatatgctcctgaggactgtaaacaccgctagtattgcatgtttcacccatcattgagaatgaagagaaataaccttcccagttgacttggacgtctagacgccttaacatccgatccatgctttggtttcactaaagtttactttttatctagccacggaaactaacgataaaataagaataatatgattaaactctccaatatcagcaaagtgtttcagcagggatcgcgtgttattaccgccctctctgacgtgactcttcacgtccctgccggacagatctatggcgttatcggctcatcaggcgcaggcaaaagcaccctgattcgctgcgccaatatgttagagcgaccaaccagcggtcaggttctggttgatggtcaggatctgacttcattatcagaacgcgaactgactcgcgcacgccgtcagattggcatgattttccagcattttaatttgctctcctcccgtaccgtattcggtaatattgctctgccgcttgagttggataacacgccgcgcgcagatataaagaagagagtgctcgaattacttgatttggtcggtttggctgataaacaggacgcctatccggctaacctttccggcggacaaaaacagcgcgtggctattgcccgagcgcttgccagcaatccgaaagttttattgtgcgacgaagccaccagcgcactggacccagcgacgacccgttctattctggaactgctgaaagacattaaccgtcggctgggattaactatcttgttaatcacccatgaaatggacgtggtaaaacgcatttgcgatcaggttgccgttattagcgaaggcaagctgattgagaaagacagcgtgagcgaagtgttctcccatccgaaaacgccgctggcgcagcagtttattcattccacgctgcatctggatatcccagaagactatgccctacgcatgagcgctgaacctgcgtctgaccgtgtgccattgctgaaactggaatttaccggcaaatccgtagacgctccgctgatttctcaggcagtacgtcgctttaacatcgatatcggtattctgagttcacaaatggattatgccggcggagttaaattcggcgttatgttggcggaattgcacggcgaaagtgaagatggcctggccgcaatcaaattcctgcaagatcatcatgtaaaagtagaggttctgggttatgtctgaggcaatgatgtggttaatgggccggggcatctgggaaacgattgtgatgaccttcgtttccggctttttcggttttgtactgggcctgccaattggcgtgttgctgtatatcacacgtcctgggcaaatcagcgccaacagtaccttatataagacagtctcagcgttggtgaatattttccgctccatacctttcattattttattggtttggatgattccattcactcgcatgatagtaggcacctctatcggcctacaggcggcaatcgttcctttaaccgtaggcgctgcgccatttatcgcgcgtatggtagaaaacgccctactggagattccatctggtttggtagaagcggctcgcgccatgggtgccacgccgttccaaatcatcaaaaaagtattattaccagaagctttgcccggtttagttaacgcggcaaccattacgctgattactctggtcggttattccgccatgggtggcgcagtcggtgccggtggtttaggtcaaatcggataccaatatggttatattgggtatgacgcgaccgcaatgaataccgtcttagtattattggttattttggtctatctgattcagttctgtggtgaccggatcgtcagagccgtgactcacaagtaataatcagcctgcgatagcgctcacagcggcgcctattaaaatgaatgtctatagaggaaaggatatgtcttttaaattaaaatctatcgcggcagtcggcgcgctgatcggaaccctgcttttggccggttgtggtcaggaagaaaaagatactaatcacatcaaagtaggtgtgatcgttggcgctgagcagcaggttgcagaagttgcgcagaaagttgcgaaagataaatacggtctggacgttgagttagttgtattcaacgattatgtgttgcctaacgaagcgttgagcaaaggcgatatcgatctgaatgcttttcagcataaaccttatctggatcagcaaatcattgatcgcggttataaattggtttccgttggtaattccttcgtttaccccattgccggttactccaagaaaatcaaatcactggacgaactgcaaccgggctccagcgtcgcagtacctaacgatccaactaacctaggccgttccctgctgctgctggaaaaacaaaatctgatcaaactgaagccaggcgtaggcttgctgccaacgaagctggatatcatcgaaaaccctaaaaacctgaatctggttgagctggaagcgccccagttaccgcgcgttctggatgaccagaaaattgcgctggcggtgatcaacaccacttatgccagccaggttggtctgactccggcgaaagacggtctgtttgtcgaaggcaaagactcaccttacgttaacctgatcgtggcgcgtgaagacaataaagacgcggaaaacgtgaagaaattcgtacaggcctaccagtctgaagaagtttacgaagccgcgaataaagcctttaacggcggtgctgtaaaaggctggtaatttttcattactgattttagtgaatatatcttcaagacgggctacggcccgtcttgttatttgcatgatagattgcttcaatagcgcaacttaaatataaaaagcaaaggaatctctatgcgtgcgttacctctctgttggttagctctttcgctaactggatgttccatgctgcaaaccgaatcatccaatggcgggaagatgttgccaaacccacagccgacggccaaatccactcaaactacggctccgcgttctgcgccggtgaaactgtataaaaccgccgaagagttggtcggtaaacctttccgtgatttaggggaagtttcaggtgaatcctgccaaaccagcgcgcaagactcaccgccgaatattgccacggcgcgtaagagaatgcagattaaagcctcttacctgaaagcaaacgcggtattgctccatgaatgtcagattatcagcggcgcgccaggttgttaccagcaggcgatttgccaaggttctgcgttgaacgtatcgtcaaaatgaccacgttttcctttgagcagatcggcgttatccggtcgccctataaagaaaaatttgcagttcctcgacagccggggctgattgaagacggcggcggtgagctacaattactggctccttataatcagccagaggcagttcgcggcctgaatgattttagccacctatggataatgtttgttttccatcaaaccatggacggcggttggcgacctactgtgcgtcctccacgccttggcggcaatgctcgtatgggcgtatttgccacccgatcgacttttcgtcccaatcccatcggtatgtcgctcattgagctgaaagccgtgcgagtgaaaggttcggaagtggtgcttgagctagggagtctggatctggtcgacggcacgccggttatcgatattaaaccctacctgccctttgcagaaagccagccgctggctcgtgccggttttgctcaatcagcacctgacaccgatatgccagtaacattttccgcttatgcccaacggcagttagcagaaaatcaggcgcgctacccgaatctagagcgttttatttctcaggttctggcacaggaccctcgtccggcctatcggaaaaatgaagtagaaacgcgggaatacgcagtattattattagagtttaacgttcgttggcgagttattgggcagcaaaccgaagtgttatccctcgacccacgctaaatttcgtgctgttctcttttgacaaccgtttctcactggtaaactaagctacttttactgtttttgactgcctgaccaatctcggcagcctgttgcaatttgcagttctaatggaaccaaaacatcatgcgcactagccaatatttgctctccactctaaaagagacgcctgccgacgcggaagtcattagccatcaattgatgctgcgtgccggcatggttcgtaaactggcctcaggtctttatacctggctgcccaccggtattcgcgttctgaaaaaagttgaaaacatcgttcgtgaagagatgaacaatgcgggcgctattgaagtttccatgccggtagttcagcccgcagacctgtggcaggagagcggtcgttgggagcaatacggccctgaattgctgcgttttgtcgatcgcggcgaacgtccttttgtacttggcccgactcacgaagaagtgattaccgatctggttcgtggcgaaatcaactcttataagcagttgccgctgaacttcttccagattcaaaccaagttccgggacgaagtacgtccgcgctttggcgttatgcgcgcccgcgagtttctcatgaaagatgcttactctttccatacaacgcaggagtctctgcaagaaacttacgatgccatgtatgccgcatacaaccgtatctttgaacgtatggggctgaacttccgcccggttctggctgataccggctctatcggtggcgacgcatcccatgagttccaggttctggccgacagcggtgaagacgatatcgttttctctaccgaatcagactacgcggcgaatatcgaattcgcggaagccatggcgccaaacgaacctcgcgcggccgcgtcggaagaattgcgtgttattgatacgccaaatgcgaaaaccatcgctgaattggtagaccaattccagttacccatcgaaaaaaccgtcaaaaccctgatggttcatgcccatgaagaaagtggccataagctgattgccctgctagtacgtggcgatcacgagctgaacgaaatcaaggcggagaaactaccgcaggttgccaaaccgctgaccttcgcgagcgaagaagaaattcgcgctatcgtaggcgcaggtcctggttctctcggcccggtgaacctgccaatgccagtggttatcgatcgcagcgttgcagttatgagcgatttcggcgctggcgcaaacattgatggcaaacattacttcggtattaactgggagcgcgatctgccgctgccgcagattgctgatctgcgtaacgtggttgaaggcgatatcagcccagacggcaaaggtactttgcagattaaacgcggtatcgaagtgggtcatatcttccagctgggcaccaagtattccgaagcaatgaaagcgacggttcagggtgaagatggccgcaatcaggtcatgaccatgggctgttacggcattggggtttcccgcgtagtggcggcggcgattgagcaaaatcatgatgaccgcgggattatctggccagatgctattgcgccattccaggttgctattctccctatgaatatgcacaagtctttccgcgttaaagagctggcggaagaactgtacgccactctgcgcgctaaaggcatcgatgtcattctggacgaccgtaaagaacgtccgggcgtgatgtttgccgatatggaactgattggcgtgccgcacaatatcgttattggcgatcgcaacttggacagcgaagaagtggaatacaaaaaccgccgtgccagtgagaagaaaatgattaaaaccagcgaaatcattgagttcctgctgagtgaaatcaaaggctaatcagccgagaatggataccaaaaagccctgtttttaacagggctttttctttagctgaatcactgaaaaaccagtgaataatccgtccgcttacgattatttgctattacaggtcttacccgcagtgaacttgatattgccatcaggaatcatggacttatcccactgtccgtcttccatagacggtcgcataccaaaatgtccatttaacgtcaggaaaatcggctcgccggcgtttttccgcgcattcatataaccggtttccaactcgacattattatcaaccgcgaagctatggccggtagcgcagtcggtaaactgtgccgcatcagccatataaatatacatgccacgcaaaggaatagacgtcgttggcaaagcttcgctggccgttaactggtagttcagagaggatgtaatccgttgtccattttgatccaacatttccagattctttcctaccggatggaaatagcgcttctcacctttagcgctggttaacactagcttatcggcggttcgcgcccaggttccctgctctgagaatgtcctatcgccatctctggtatcgcgataagtttcctgcaatacgaaggtgccgtcagcatctaaaaataaagacgtatccagcccactgcaatccgcgcaaggcaatacgccctgataactttgcagcatcggttgtaaaggttgctgttttggctgataaaggtttttacagcccagcagtgacaaagcgccagctgctaataacaaagtaatactgagttttctcacagcttatctcctactgcgtaccaatcctatggacccacacccctgcggtatcaatcctgatgtattttgccgcgcagcgctttagttgcacctttgcggacttttccttccacccgccgaattttagagcctttggtcggcttggttggtcgccgggtcttctctacgaccatggcttggcgaatcagcgccgctaaacgggccagagctgcctcgcgattcatatcctgactgcggtattcctgagccttgataatcaccaccccatccgccgtgaccagatgatgattcagcgccaacaggcgctgcttgtaatactctggcaggctagaggccttgatgtcaaagcgcaaatgtattgccgttgaggatttattaacatgctggccacccgcgccctgagcccggatcgccgttagctctatctcgctgtcggccagcgtcacgctattcgaaatatttaacacacttattgctcgctgccttgccattcagaaaaagtgatttccagattattctgagcatcagaaagccaaatggttccctcttgcagggtcgcctgcaaattcatgttgcgagcggacatcgcagccagtttcgccatttgctcatcatccagaaaacgtacctgaagattttcatggccggaaagtttctctttaacctgcggccaccacactttcgccgcgcgttccccataggaataaagaacaacttttttcgactgattgcaggctttgcgcaagcgcttctcgtccggcagccctaactccacccacagctcgatgccgttatgatcgttacgcagccagatttccggctcatcgtccgcacttaggcctttggtaaataacaaacgctcgtccgcatggcaaatccacgccaatagccgcagcatcatgcgttgatcggtttcggaagggtgctgtgccaccgtcaggttagtatccataaagacattgcgatccatatcggcaatattgactgtggctttgtgaatggttgcttttagtgccatgggtgacctcttgattttcaggaggacagtgtacttgatcccgcctttgcgcgcgctgctaaccccacataaaccgattattaatggcttttagtaagcaaagaaaccttccgctgaacgctgatatctcttcaactcctgtgctatagtccttataagttcagagtttatcttcgtggttttacaatgtggtttaccattgaaaatccaccgggttaaacttttccgggaggataccgtgcaacaatactgtgaattagtacgtcgtttttattccgagattggcagtggcgatcttgggtatgtgcctgatgcgctgggctgtgtattgaaagcattggacgaagttgcggcaaatgacgcactgccgtcctccgttagggaacaggcggcttacgccgccgctaacttattggtgagcgattatgtcgatgagtgaagagtatcaacccatcaattgcgatgattacgataatctggaactcgcctgccagcatcacctgatactgacgttgaagttgagaggcggtgagatcgtagaaggtaaagccagcgacctgctattacgcaagcatgtcgaatacctgattgtggaagaatcggggaaaatgcgcgagttacggctggatcatatcgccagcttcagtcatccagaaattggaactgtcgtggtcagtgcttcgtaatcctttcgccaaaaaaaacgggccgctgaaaagtggcccgttttgtttttaaccaaggcgaaatattagggtttaaggctggcatagtaagccgccaaatcagacatatcctcatcggtcaaacctgaaacataggcgcgcatcacctcagcctgaccgccagaacgcccgccggttttatacgcttttagcgattgctcaagatagagcgcattttgccctgccaaattcggatacatcggcaccgaaaccttaccattcataccgtgacaggcaatacaggcggcagacttcgccttaccggcctcaatatcatttttcgccattgcagaaaaactgcataggctcaacgccactgccagacacacaactgatttcatcattgatcctcaagaccgcttttattattcgttatttattctgttattcagctgacgccactgaacgcaccagcaggctccgccttcttcggctacgccctctggcgtgataaatacgccgatggcggctatcaattgctcaccaaaatacaatagcggaatacgttcgcgctcccaaggcggaatgcctaattcctgccacaattttttagcgcgccgcgaatgccgacgcccaacgattctgatgttcccctgtaggccaaaacggacgctaacaggttcattttcagcgggcactcggattttctgtcccttctcatcagccagttccaaacgtcccagcccggcgggtagctccaacggcgatggcacagaccacggtaaaactgtcgtagtgatggcttccaactgcggtaatacatacaaatattgccgaaaacgccgtacctgatgaggagctaactccagcaccggttctgcatcagcccgcgccaacgccacttcattccaaattcgctgtagctgttctctggcgggcatcgccacgcctttctctgccagccaacgacgcagcaaggcaccgcgtttagcttccgacattagcgctaaaccgttgatcgctaaagaaccatccggttgccgtagttgcgccaagggttcagataatagctcatctaacaattgttcctgctcagcgcacaactccgcactacgcgccaccgatcgggaaaaatgcggccaacgttcggataaaaccggcaatactttcagacgcagaaaattacgatcgaagcgatcgtcctgattgctatcatcttctatccatgccaactggcaatcttcggcgtaacgctctaattgtttgcgagaaatagctaataatgggcgcaaaatctgcccctcagcaaatggcatagccgcagccatcgaagctaaacccgcagggccgctgccgcgttttaacgccagtaaaaaggtttcactttgatcgtcgagatgctgagcagtaagtaaggtttctccttctgccaagtggctggaaaaggcctgataacgcgcggttcgcgcggcggcttctatcccactgtggcgcgtatcgagctgtacccgaacaacttcaaatggcacattccagccctgacactgtgcctggcaatgttccacccagttttccgccagtggattcaaaccatgatgtatatgaatagcgcgcagggttagagacggcaacagactagcgcgcagctgcaccaaagcgtggagcaacacgctggaatctagtccaccgctgaatcccaccagaaaactggtttgcccacgcaggttatcggcaatatattcaacgagttgttgtggctgattcatcgatacatcaccgagacggcttcaattcatacagttccaacggcagcccgtccggatcctgaaagaaagtgaaacgcgattgtgtataaggatcgattcgcaccgtttcacaagccacgcccttctcagccaattgcttaacgctcaaatcaatatcatctacctgaaacgccaggtgacgtaagccacaggcttccgggcggcttggccgcgcagccggagccgggaaggaaaataactcaatgatataattatcgtttaatgccaaatcggctttccaggaatcacgctctgcgcgataaacctcactcagcaaagcgaatcccaatacgtcgcagtagaaatccttgctgacctgataatctgagccgatcaccgcaatatggtgaatctggcgaatgtccaacatggctggctccatcattatttttcacccgctggctaacgggtgatgggttatcaactggttttcagcaccttaaccatatatcgtccatcgtcggccagatgagcgccgtgaatatcggtttcaaagccgggatagtgctcgccgatagcacacagcatcagcaggaaatccaacaccgctcggctttcttcggtaatcatttcacccggcatcaccacgggtacgcccggcggataaggcagaatcatattggcaaccactttgccaatcagatcacccatttcacattcttctatattaccgcggatttgctgttggaacatatcgtaaggcgtcagtttcatttccggcaatacgctaaaggactgatgcattagacgcggcaagtcatggtgacgaataagttgatgtatgccggcggcgagatcctgaattcgcatatgacgataaaaatcaggatcttccgcatacaaatccggcagcatatttttgacacgtaaattcagatcataggcgcgcttaaactccatcagcccacgtaataaactcatggctttggttttatctataccaatactgaacaggaacaataagttatacggcccggttttctcaactataacgccacgctcatcgagaaattttgccactagagcggcaggaataccttcctccgtcaactgcccatcactgttcattcccggcatcagaatcgtgactttaatcgggtccagatacatatgatcagcgtctgccttagcaaagccatgccagttttcgcccggctctagcggccagcactggatgtcttcaatatcatctggctgccagacgtcaaagaaccagttatcgctttcggctctcaagcgcttaacttctttacggaaatgcatcgcgcgctcaatagagcgctgaatcagccgtttgcccggtttacctcgcatcatggcggctgccgtttccattgaggccacgataccgtaatgtggggaagtggtcgtgtgcatcatataggcttcattaaaggtcgattcgttataatcgccttttatatgaatcatcgaagcctgagaaaatgcggccagtaatttatgcgtcgattgggtttcgtaaataactttaccgggaatcctatcgccgctcattccactcttaccatcgtagatctggtgaaattgagtgtaaggcacccaagcagaatcaaaatgtatcgaaggaacgtccagagtctgtttaatataatcggtgttatacaacagaccgtcataggttgagttagtaataaccgcatggacaggccaggtagcccccgccgtttgcgcgatcttttcgttgatgctttcgcgagtaaactctctcttcggtattccgcccaaaataccgtaggcattacgcgcaggccgcaaatatagcggcgtgatatcgctcatcatcaataaatgcgtcagtgacttatgacaattacggtcgatcaatatgctgcaaccggctggggcagaatacatgccgacgattttattggcggtcgacgtaccgttggtcaccatataacttttttcggcgttgaaagtacgcgcgatatactcttcggcttctaaatgcgggccgctatgatccagtaaagaccccagttcggtcaccgaaatagaaatatcggcttttaaggtattggcgccaaagaaatcataaaataggctccccaccgggcttttctgaaatgccgtgcccgccatgtgccctggggtgcaaaacgtatattttccctctttaacatagtgaaacaacgctttggtcagcggcggcgtgatgacatcaatatactcggcggtatactgctcaatatgctgagcaatatcatcggctgcgttaagcgcatattcgaagaaatacagtgccatgcgcatttcattcaggctgacatccagcgatgaggtcgtattgataaaagcataaatcggcaggtattcatttaactcgttgatctcggtacacagcgccatgctgtgctgatcccaatcgaaaatgacgccaataatccgagcgttatgttcaatcagcttgagtagatcctgcccatctttcgggtaaaccagttgaaaacctttagcttgcagagcgctgtgaagctcacgaattggctcatccttatagtaaccccccattgggctcataatggcgatgatattcatttgtatagtcctcacatttttatttatccctataacaacatgaaaactcgccgctgtgtacctaattagataataatgttggaaattctatatcagacaccatgccatatattgactgcattctggacaaaataataaatttaatcaccgagtgaattaatcgggcgagattaaagccacaattaaaactaaaaaagagaacgatcagacaataataattatcaaaacaagcccagccagcaaattaaataacatcaagtaataatcaaaatgtaacttattttaaggcttttaaatttttgatttacatttaacacttcaccatcaaaatataatattttatttcacaggttataaggatggtgttatgcagggaaagtttctctctctattaatcaatacactgtttattattggacttctatttttttatatatccgccagctatgctatttaccccgttaacctggtataccgcgccgacacccgggacttaggggagataaatgcagctaacggaatgcgtccttgggcaggcccacgcgttgattatgatcttatacatcattttgatggagaatctgtcgatgattacaccagtgcctttgtctctaccagcgcttcgtttcgtcatagcatcgagcacgcagcatcacttgccagagccaatagcgaagagccttttgaggaagactttcgaatttttatctatgccataaggccagagtcaaacttctatgaagtcgaaggttctatcgcacatgccagagataccagcgccgaacactcaccacgacaagccggattatcagcgctattgcataattatggcggaatggaggaatgggtggcgctggaaggtatatcggcggagcggatcatttcttttatcgaaataaccggagaaatattgcagaattattatcaatccggtcagctattttcaaatggcttttggataaatcgatggcagccaaatttaggttataactcagccaacgatggtgatatcagtagctcagaattttatacccatattggcaatccgcgaggttatcgtgatgtaatacaaggtgaaacactgcccccattagccgcctcttttacttgtataactcccaactccaattccatgaagaaaaggcagttacaaaataaaagatgtaaaaccagaaaaggcagacatttttatttcgtcaacagacttattgcggcattagagaataacgttgaataaataaacatatctcaatgagatattaacccaccataatataaatgatacacggaggttattttgaataaaccgattattttttctctgtttgtttcattaacgcctattgcctttgccgatgatactcctggctccagttatgtcatcgatgggaccgtcgcggccattcgcgtatcggatcaggggtgtcggatttcatttagtgagagaaccgaaccacgcgaaaatatggtctggcattttagtgacgtaccgataatctgtaatctggctaaaacggcttatgtactgcgggaaaaggtcagagtaaacgtggagataaacccggataaaagttacgttaacactatttctagtattattcttggcgataccaactcaaagtggttacccaataatctctgattgagcggctattattgcccaataaaaaacccggagtcaaagtgagtccgggtttttgtctgaaagattaaatcagcaatagccgtagttcatcaaccgctggtagcggcgattcagcaactcatcgttattcaacacatccagatcgctcagatcggccagcaattgcgctttcagtgaagcggcaatggcctgataatcgcgatgtgcaccgcctaaaggttcaggaatcacggaatcgatcatcttgagctctttcaggcgtggcgcggtaatacccatagcttcggcagctaacggcgctttatccgcacttttccacagaattgacgcacagccttccggcgaaatcaccgagtaagtgctgtactgcaacatattcactttgtcgcctacgccaatcgccaacgcgccaccggagccgccttcaccgataacggtacagacgataggcacattcagacgagacatttcgcgcaggttacgggcaatggcctctgactggccgcgttcttcggcgccaacgccagggtaagcccccggagtatcaatgaaagtaatgatcggcagcttgaagcgctcagccatttccatcaaacgcagcgctttacggtagccttctggagcaggcataccgaagttgcgacgaattttttctttggtttcacggcctttctgatgaccaatgatcatcaccggacggccttccaaacgggcaattccgccgacgatagctttatcatcagcataggcacggtcacctgccagctcttcgaaatccgtaaaaatgttagcgatataatccagggtataaggacgtcgcggatggcgcgctaattgagcgacctgccaagccccgaggtccgaaaaaatcttccgcgtcagctcaacgcttttctcacgcagacgctggacctcttcatccagattaatatctaatttttcgtcttgacggctgactgcagtcagcgagtcaattttcgcttccagctctgcaatcggctgttcaaaatcaagaaaattcagactcatagcattcctattttagtcaaattccagttccacctgctcattaccaaccagcgtccgcaggtcgatcaataaacggtctgtcggggtaacacgccacgtggcaccaaatcgtagtctggcgcgcgcatcttcccgttggtaataaagatgtactgggatcgtccccgatcggtggggttccaacgattggcggagacggttcaaaagctggtcatcaatttgcctgtcagtcagcgagatagcaagcccacgggcatatttttcacgagcttcactgatatccattaactcacgggcggtcattttaagtccaccgctaaagtcatcaaagctgacctgcccactggctatcaggatacggtctttttctaacaaatgctgatatttttccaacgcatccgtgaacatcatcacttccagacgcccggaacggtcatctagcgtacagatgccgatacgatttccgcgttttgttaccatcacgcgcgcagcgattaccagccccactgctgtcgtcattttgccccgatccgtcgggtgcatatctttcaggcgcaacccaccggtataacgctcgatttcctttagatactgggtaatcgggtgaccggttaaatacagccccagcgtctccctctcaccgtcaagaaccacctgttcctgccagcgcggtacgttagcataagattgctcgacctgctcaggcgcatccgccagtacgccgaacatatctgcctgaccaatagcttccgctttggcatgctgatctgccgctttcagcgcttctccgagagagctcatcaaggccgcacgatgcggaccgagacgatcgaaagcgccggacattatcagtttttccagaatccgtcgattcagttttttggtatcaacccgcgcacataaatcgaacagatctttaaagtagccgccttggttgcgggcttccagcatagcttcgattgggccttcgcccacgcctttgatagcgccaatgccgtaaacgatctcgccttcatcgttcacatggaaatgatacagcccgctgtttatatccggcggcaggattttcagccccatgcgccagcactcatccaccaaaccaacgactttctctgtattatccatatcagcggtcattaccgcagccataaattcagccggataatgtgctttcagccacaaagtctgataggaaaccaacgcgtaggcggcagagtgagatttgttaaaaccgtaacccgcaaatttttctaccagatcgaagatcttaatcgccagttcgccgtcaataccctgacttttagctccatcttcaaacacggaacgctgcttggccatttccgccggatttttcttacccattgcgcggcgtagcatatccgccccgccgagggagtagcccgacagcacctgagcgatctgcataacctgttcttggtacaaaataatgccgtaggtaggctctagtaccggtttcagagattcatgctgccattggatatctggataggacaactcttcgcgaccgtgcttacggtcaataaagttatctaccatgcctgattgcaacggtcctgggcggaacagcgccaccaaggcgatcatatcttcgaagcagtcgggtttcaggcgtttaatcagatccttcatcccgcgggattcgagctggaataccgccgtcgtttccgaccgttgcagcatatcaaagctctttttatcctccagcggaatggacgcgatatcgatgggttccagcccggtcttggcgcgacgggcgttgatcatctccagcgcccagttaatgatggttagagtacgcaaaccgaggaagtcaaacttcactaaaccggcatattcgacatcatttttatcgaactgagtaaccgggttattcccctcggcgtcgcaatatagcggcgcaaaatcggtaattttggtcggcgcgataactaccccaccggcgtgtttaccggcgttacgggtaacaccttccaatttacgcgccatatcgatcaaggctcgaacttcttcgtccgcttcgtaaatttcaggtaactgtggctcggcggcgaaggctttttccagcgtcatccccggatcgggcggaatcaatttggaaatacgatcgacaaaaccatagggatggcccagcacccggccaacgtcgcggattaccgctttagcggccatcgtaccgaaggtaataatctgcgaaaccgcgtcacggccatacatttcagcaacgtgctcaatcaccagatcgcgtttttccatacagaaatcgacgtcgaaatcgggcatggatacacgttcagggttcaggaatcgttcaaaaagcagatcaaattccagcggatccagatcggtgattttcagggcataagccaccagagaacctgcacctgaaccacgccccggcccaaccggtacgccgttatctttcgaccactggataaactccatcacgatcaggaagtagcctgggaatcccatctggttgataactttaagctcgatatccagacgttcatcatattcaggccgcttttgcgccctgacttccggatccgggaataaaaattccagacgttcttccagaccctgtttggatttttcgatcagaaaatcttcggtactcatatccccggtcgggaattgaggcaggaaatattcacccagccgaattgtcacgttacaacgtttggcaatttcaacgctgttgatcagcgcttcaggaatatccgcgaacagctcgcacatctgctcttcatcgcgcataaactgctgaggactataattttttggtcgtttcggatcgaccaaagtgaagccatcatgaatcgccacgcgaatttcatgggcatcaaaatccgtttcatcaataaagcgcacatcgttggtggcaaccacgggaataccgcgttcagtcgctaatgctaccgctacgtgcagataattttcttcgtcctgtcgtccagtacggattagctctaaatagtagctaccagggaagtattcattgtaaaaatcaagacattgatcgacctgagcctgattgccacgcagcaaaaatttgcctacgtcgcccatacgtccgccggacaacaaaatcagcccttcgcggtgcttaatcagccagtcacgatcgataaccggccctgcggggccatagccacgctgataagcctcggaaataagcagggtaaggttttgatagccttcgttgttacgcgccagaatagtcagatgcgcaaactcatcgcccagcatctcgctctgcacacagaaatcagcgccaatgataggtttgattcccgcgccgtgagcgctgccgtaaaacttcaccaaaccgcacaggttggtaaagtcagtaatcgctaacgctggcatgcctaaggcggcagcccgcttcaccaagggtccaatcttggctaatccatcgatcatggaataatcgctgtgaacacgcaggtggacaaaacgaggttcggccatatccagataccagaaattagtggattgaatcacacccgcaggactgggtgtctcggggcatcataactataacctgtatcacgcaaaccattgtatggatgcaattcgatattcactggctatacgttgtttccatcaggcagtagcaatgcgggcctatgccagcccgagcacgcgtttaaccggagcaaaactgcgacgatggtgatctgtggcacccaatgcggccaaccgctctagatggaatgcggtcggatagcctttatgctgagcaaagccgtaatccggaaactcggcatccagcaacgccatttcccgatcgcgggtcacttttgcgacgatagacgcagcgctaatctcagccactcggctatcccctttcaccaccgcgagggacggcatcggcagtgccggacaacggttaccgtcgattaagacataatcaggcgcaatatgcagcccggcaaccgctctctgcatcgccagcatggtagcgtgcaatatattcatatcgtcaatttcttccggctctgcgcgccccagactccaagacagcgccttctcggtaatctcgtcataaagcgccaatctgcgcttttcactgagtttctttgagtctgccagcccgataatgggttgattcgggtcgaggatcactgcggcggtcacgaccgcgccaaccagcggcccgcgcccgacctcatcaacgccggcaatgagatttgcctgcggataaataaaaatatcgctcattgcttcgctaattccaataccgcctgtgcggcctgtttgtccgcatcgcagcgaatgctttggtgcaaggccagaaaacgtgtttttagtgcttcaaccgcctcgccacccttcaataaaggtaataaagcgtctgccaatttttgcggctgacactcttgctgtagcaattcgggaaccagttcttcgcccgccagtaagttaggtaatgagacataaggcgttttcaccaaacgctccgccaaccagaaggtgaaaggcttcatacggtaacccacaaccatcggcgatttggccaacatgcattccagcgcggcggtgcccgaagccaacagagtggcatcgctggcgaccattgcagctctggctttaccatccaataaatggacggataattccggtgcaacttcggcttttatacgttcgaactgttcccgacgcttgctgttcaccagcggcaccaatacttctaaatcagggaattgctgccgtaatatctcggcggtgcgtagaaagtcggcacttaacatttcgacttctgaatgccgactccccggcaataacgccagacagtggacatcagtagcgatacctaattcagcacgagccgccgcacgattggcaaccaacggcatggcatccgccatggtgtgaccaataaaacgacagggaacgttgaaacgatcgtaaaacgctttttcgaaaggcagaaaagccaaaaccatatctgtggctttaccgattttgaaaacgcgcttatgacgccaggcccaaaccgagggactgacgtaatgaatagtgcgaattccgttctgctttaagcggccttccagggtgatgttaaaatcgggagcatcgatacccacgaatacatcgggagaaagctcgctgaaacggcgcgtcaaatccttacggattttaagaagacgcggtaaccgttccagcacctccacaacccccatcacagccaactcttccatttcgtaccaggcttcacaaccctcggcttgcattaaggggccggcaacgccgacaaagcgggcattgggaacctgagctttaagcgcccggattaaccctgcacctaaaatatcgccggaggtttctccggcaactaacccaatagttaatgggcgatcggctgtcatgacaggctcttgcataagttagcggataataccgcgggtcgaacgagcgaagaaatcgctgaacggcttaaccgcaggatgctgctcggccaattcggcaatttccggcttcacttcatccaaagtacgtccgctgcgatacacaagcttgtaagcattacggatagcatgcagagattctttatcaaaaccacggcgtttcagcccttcgatattaataccgaacggtgtcgcgtggtttccttgcgctatgacaaaaggaggcacatcctgcgcaaccccggaacagccgccaaccattacatgtgcaccgatcacacagaattgatgaacagcggtcattccgccaataatggcataatcatccacttcaacgtggccacccaaagtcgcgttattggcaaagatgcagcggttgccgataatgcagtcatgagcgatatgggcattaatcatcagtaggttatcgctaccaactttcgtcaccccggtaccttgtaccgtgccacggtggatagtcacactttcacggatacggttacgatcgccaatttccacccgtgtcggttcgccggcatatttcagatcctggttagcttcaccaatggaagcaaactggtaaatctcattatcgcggccgattttagtcacgccgttcacgacaatatgggatttcagtactgtgccttcaccaatttccacctgggaaccgatatagcaaaatgggccaatgtgaacattagcaccaatcacagcaccttcttcaacgatagcactcgggtggataaaggcggttttgtcaatcacgtatcaagactccttagatgcgggtactgctgctggtgccggtttgctgcgtgcgcacatcatggtggcagtacagacaatttcaccgtcaactttagcaacaccggtaaagcgggttaaaccacgacgctctttgacgaattcaacttccataatcatctgatcgccaggcactaccgggcgtttaaagcgggcttcatcaataccagcaaagtagtaaagttcgcctggttcaagtttaccgcggcttttaaatgccaaaataccggtagcctgcgccattgcttccaaaatcagtacgccagggaaaataggcttaccggggaaatggccttggaaaaaaggctcgttgaaagagacgttcttcactgcacgtagaaatttcccttcctcaaaatccaggacgcgatctaccagcaaaaaaggaaaacggtgcggcagtagatctaaaatctcttcaatatgcagagtatgagtgtcagtagtcaaaatactcttcctgtctaaaaaattaatgctatcaacgacacggcctgctttgaccccaaaaggagatcattaggcaggccgcaaattaggaactctgtacgcttcgggcagtaagcgccaatagcttttgttattggctcagagtggtaattactctttatcgattttacgttcgacagctttcaaacgcttattcatctcatcgatattcatcaccagtgctgcggtttttcgccacgttttatttggctgcaacggaattccggaggagtataccccaggttcagtgattggacgcatcaccattcccattccggtcacaacaaccttgtcggcaatctccatgtgaccattgatcacactggcaccaccgatctggcaatatcggccaactttcaggcttcccgccatgataacgccgcccgcaactgcggtattgtcgccaatagtcacgttatgcgcaatctggcattgattatcaatgatgacaccattaccgataaccgtgttatctaacgcgccgcggtcgatagttgtacaggcaccaatctccacgcggtcaccaattattacggtgccaagctgcgggattttgatccaattgccacgatcgttagcgtaaccaaaaccatctgcaccaatgaccgtaccggattgaatcaggcaatgctgcccaatctcaacttcatgataaacggaaacattggcccacaaacggctacctgcaccgatacgtgcatttttaccgacaaaacagcccgcaccgataaccacgttatcacccagaacaacgccggactcaatcaccgcatttgcgccaattgatacctgattgcccaaggttgcttcaggggaaatcactgcgcttggggcgatgtcctgagctggctgcggagtggtatccataatctgcgccatgcgcgcataggtcagatagggatttttaacgactaaagcagcaacgttacaataaggcagatcttcctcggtcaaaaccacggcgctagcttggcaagacgcgagttgttcccggtaacggctgtttgacaaaaacgtgatttgcgcaggtttggcagaatgcattgaagcgatgccggtgatgacaatttcgccatcaccgtgcacttgtgcatccaactgctgggctaaatcagccagtcgaattgaaggcatgtgttatttaacctgtttcagcacgtcagcagtgatgtcttttgaggaatcagcgtatgccacagcattcgcgtcgataaccacatcatacccacctttacttgcaacagatttcacagcgtcctgaatacggctcaggattttgttacgctcttccatctggcgacgacggttgtcttgttcaaacgcctgcgctttttgagagaaggtttcacgctgcgccatgacgtctttttccagtttggtacgatcgctggctttcatggtagaaccgtcgcgctgcagcttctgcattttggtctgcagatcgcgctccattccttgcagctcggttgcacggcctttgaattcattctccagctgcttagccacggtttcacgcgcgggtaattgttggaaaatgctggaaacattaacaatagcaatcttgtcagcggcttgaacgctggctgaagcagccaatgctaaaccaagacctgcggcacacaaccactttttcactataaactccttaccattacccgtttgtgtcagagacaccctgaaatgcacttgacgccggatttatccgatgcggcaaaggtaatactagatcacctttgcaacagggagatcggcgtcagcgcgatctttacttatcgatcaacaattcttgctcaactactcagtagcctgttaccaggttttaccgatgttaaactggaactgctcggatttatcacccggatagtctttgaccggtttggcgtaagagaacaccaatggacccagcggtgacatccactgtaatgctacacccgcagaaacgcgaatattgcttgggtcgctgtagtcaggaatcccggcggctcccgttgccgcagtgttttcccagtgggtatcccaaacggtacctgaatcgataaagatcgaagtacgaaccgagttagaatacttttcactgataaacggcgttggcgtgatcaattcgatactcgccacagccatggcattaccgcccacagcatcggtagatttattaaccgtagcgccattattcgcatagtatgcagctttaggcccgatgttgttcgagcggaaaccacgtacagtgctggaaccaccggcatagaagttctcatagaacggcatttctttgccaccgaggccatcgccataacctaagcgcccgcgacctaacagaacccaagaacgatcctgatccaacggcaggtagccggaagtatcgaaggtcactttgtagaattcattatcggagccaggaacggttactttaccgttaaccgaagattttacaccggaagtcgggaagaaacctcggtctaggttgttataagtccaaccaaggttcagggtaaagtcatcagcggtgaagtcagcgcggtcagtatagttcggcttttggccgactgactcgagataacgccacatagcaacctgcggcaacatgtcggacagactgttgtgcacatagcccacgcctacgcgtaatgagttattttcgttgattgggaacccaagggtaccgtcaacaccgtagctgctgttggtatagccagacaggtctgcgttatccgctttaaaatcgttgtagaacacacgaccacccagactcacaccgtcaacggtgaagtaagggtcggttaacgtaaattcagcataggtctggtaatcattcttagtaccgttaatccctacgctgttacccgtgcccagccagttatcctgttgaacacccacctggaaactcacgccactttcagtaccgtagccaatgccgaagttcaggctaccggtattacgttctttaactttgtaaacaatatcaacctgatcggcagtacccggaacacgctgcgtttccacatcgacggtttcgaagtaacctaaacggttcagacgatctttaccttgttcaacctgagcgttacccagccatgcaccttccatctgacgcatttcacgacgaagaacggaatctttactggtgtcattgccttcgaagcgaacgtgacgcacatagaaacggttacccgcatccacattaatgtgcagtttcacggttttatccgcatcgttgatttcaggctgagtctgtacgcgtgggtaagcgtagccatagcgacctaacatctttttgatgtcgtcttccatgcgcgtcactttaccgccgttatacaactcgcccggctcaattttggtcagcttctcagcttcagactgatggcccgccagattcccgttgaccaccacgctgctcaacttgtactgctcgccttctgtcaggttgattgtgatgtagatgccttttttatccggcgtcaaactcacctgagtagaatcgatgttgaagcgtgcgtaaccgcgatccagatagaagctacgcaggatctcaagatcgcctgccagtttctgtttctgatatttacggtcaccaaccacgttccaccaaggcacttcatcgcgcagctggaaacgtgaaatcagttcgtctgtgctaaacgcatggttaccgacgatattgatctgctgaatcttggcagatacaccttcggtaaacaccagcttcagatcgacacggttgcgcggcaacggcgtcactacggctttcaccgaagcgctgtatttacccacgctgtaatagaagtcctccagacctttttcaatgctggagatcgttgtgcggtctagtgcctcgccaacccgaacgccagaggcttcaaggttctgtttaagcatatcctctttcaccgctttgttaccggagaaagtgatactggcgatcgttgggcgttctttgacttgaacaatcagagtattaccatcgcgcagaacgcgaacgtcctcgaagttgcctgtggcaaacaacgcacggatagtattactgatgtcatcatcactgacggtatcgcctacgcgaaccggcatattaagtaacgccgcaccgacggcgactcgctgcaggccctcgaaatgaatgtctttcactacgaacccgtctgcaccgtatacggtggcgctgccaaacagcagcgacgctatgagcaactttttcatcgccatcgttgttatgcgttcttcctaacctatcccctgccgttaaaagcgggagaaatcattgaaaagtgcaagtcccatcaacagcattagcaatatcgagccaatgcggtagctgaaatcttgaactcgctcagaaaccggcccacccttgagcttttctatcgccaggaagagcagatgtccaccatctaataccggtaacgggaacagattgataatccccaggttgacactaatcagtgccaaaaacatcaggtaataaaccaatccgaactcggctgaaacccctgcgccctgtgcaatggaaatcgggccactcaggttattcagcttaacatcaccagtaatcagtttacccaacatgttgaccgtcaaccgcatcaactgccaggttttatccccagcctgatagagtgccgtaaacggaccatattggcgaatcgttttatactcatccggaagcggtataactttcggaattacgcctgcaaagccttcggttctgtctttacccgccgattttgtatctggaatcagggttaaagacaagggagaaccacccctttcaatttcaactgccagcggcttgccaggattttcgcgtacccggctggcaaatgtctgccaaccttcaactagctgaccgtcaactttaacgatcctatcccctgcttgtaaacccgccttttgcgctgccgactctgtttgaacctcttgcagcactgattcaatctgcgggccacgaggaataatccccaaagtcaccacggggtcctgcttatcaggctcgaacgaccattgacgtaaatccagagttttctgtactacgttatcagagccaaaaggggctacgccaacttgcacctgctggtcgccaattttaccgaccagagcaagacgaactgcagaccaatcaggcgtttcgataccgtcaacagacttaagttccattccagcagaaatatcagcctgcgcagcaatggattgtggggatatttcacccacaaccggacgaaagctcgggatgccgatgataaacaccagccagtaggcaaaaatagcgaagaggaagttggcgatagggccggcgctgacgatcgcagcgcgctgggcaatacttttattgttaaaagcctgatggcggaattccggggcaacggcctcggcacgctcatccagcattttcacataaccgccgaggggaatcagggcgatcacatattctgtaccttgtcgatcggttctgcgccataaggctttgccaaaaccgatagaaaagcgctcaacacggactccacagcgacgcgccacccaaaagtggccgaactcgtgaaccgtaattaagatgcccagcgcaatgataaatgcagccaggttccagagtatgctcatcataatccctaaactccccgtcagtgacggattaaaacactaacagcatcaggcaggcaaataccggcacggctgcggtcaggctatcgatacgatccagtatcccgccatgaccaggaatcagatgaccgctgtctttgattcccgcttcacgtttgaacatactctcggtcaaatccccgagtactgaggccagagccgcaaccacagaacacactaacagtttttccggaatcacatccagcggagcatagcggccaaacaaccaggctatcaacgccgatgacagcaagccgcctatcaacccttcccaggttttcccgggggaaactttcggtgcaagcttatgtttgccgaacattttgccaaacatgtaggcaccggaatccgcgccccacaccagcaacatcacgtaaagcagccaccaggcaccggttgaatgattttgctcataaccgtactgacgcagcgcaaacatgccccagaagaatggcactatggtcagaataccgaagataattctgatggttcgcgagtcacgccagaaagcagccgagcgcgggtaggtcaacaccagcaacagagcggctatccaccaccccatcgatgcccaaagcgggccactgacttgcaaatcgtgcactgtaggttgatattctggaatactcaaccacatcgttaccagcaagaaaccgcagagtatcgccagccagatgcgctgtgagtgcgaagcgaagccagcgagctgcccccactcccaagcagccagcatacatacagccagcgtcactatggcaaaaccaatcggaggcagcaaaaacagcgccccgatgacgatagggattaaaatcaaagcagttatgagacgatacttcagcaaaagttccccctaggatgcagcaacatcgttaggtgtcgttccaccgaagcggcgctcgcgttgtgcaaatgcattcagcgcaccttcaaagacaagttcatcaaaatcaggccaaaggacatcagtaaagtaaagttcagcataggctatttgccacagcaggaaattactgatgcgatgttcgccaccggtcctgatcactagatccacctgagactgttcgttcaggcaaatatgagaatttaacaaatcctcagtgatatcttcaggttgtaacaatcccttttgaacctgcccagccaattggcgcattccctgaatgatatcccaacgtccaccataattggcagcaatgttaagcttcaaaccatcattattttccgtcagcgcttcagagcgtcgaatgcgttcctgcagacgtccactgaagcggctgatatcaccaataacgcttaaacgtacgttatgtttatgcagacttttcacttcgctgtccagcgctcgaacgaaaagctccatcagtgcggtcacttcctgagcagggcgattccagttttcactactaaaagcataaagcgtgagcgcatctaattgatgagtggcggcaaaactcaccgcacggcgaactgatttcactcccgctttatgaccgaagatccttaatttaccctggcgtttagcccatcggccattaccatccataataatagcaacgtggcgcgggccttggggggacaagttagccctatcttcatttacggacgacataacgcgaacattcttcctcaataaatacgactgctcttccctaacattaggcctcatgcgcacaaaaaaagccgtgtactgaatcacggcttcttatatgacagccaaaccagagggtctaaatacccatagaaccgttaatcaagggtctgtctgcccattgacggcgcagactatatcatctcagtccgagacgaacaaattccaccaatgaataacatcaccttcaacgacttaatgcacctaatgctcgctcagcagcaattcgtgccaaacggtcaatatctaagacttcatcgactgaattgggttcctgcaatgccaaactttcgagcacatttctgtttaatctcgcaatatctgtgaaaccgatacgcgattgcaagaaagccatgacagaaatttcattagccgcatttaacactgtggtcgccgcttgccctgcgttaaaagcttccatcgccagctgcagacacggataacgctgataatcaggctctgcgaacgtcagcgggcccatacggcaaaaatctagcgcttcaacgcctgattctacccgatttgggtacgccatagcgtgggcgattggcgtgcgcatatccggtgtaccaagctgcgccagcacgcttccgtcctgatagcgaaccatcgagtgaatcaccgactgcggatgcagaatcacttcaatctgctcagccgaagcgttaaacagccagcgagcctcgatatattccagccctttattcatcatggtagctgaatcgacggaaatcttacgccccatcgaccagtttggatgagcgcaggcttggtctggcgtcattgtggcaaactgatccaacggcgtttcacggaaaggaccgccggagccggtcaggataatgcgcgatacaccattctcaatcagagaagaatagcctaactgttgctgaacgcgctctggcaggctttgaaaaatggcattgtgttcactatcgatggggagcagctgcgcacgactttctcgcaccgcgtccatgaaaagacgaccacaggtaatcaaagattctttattggccagcagcacttttttaccggcgcggatcgccgccagcgtaggtaatagcccggctacgccgacgatagccgccattacctgatcgacttcaccgagagcagcaagttcgcaggccgccttttcaccggctaatacttcggttttgctaccttgctcagacagcaaaaggcgcagcgccgcagcagaatctacgtccgccattgccgcataacgcggggcaaattccagacattgttctgccattaatgagacattgcgccctgcaaccaatgcggtgacggcgaataaatcgggattagcccgcacaacggccaatgtactgcagccaacggagccggtagaaccaagaatagtcagttgcttcatgagggtgctctgaataactgtttttatgataggaagatgcatcagtatgaaacatctgagcccgcaagactaagacatttagcccaaatatcagctgttgtcttcaataaaaccgtacagatgtaaaaaacaaagcgccgcctaagcgacgccttgcggaaccggttaacgattagaaattcattaactcagcttctttatcggacaaaatagagtcgattttcttgatgaaggtatcagtcattttctgaacttcatcctgacaacgacgatcttcatcttcgctgatagctttatctttcaacaaggctttaaccttatcgttagtatcgcgacgcacgttacgcacagagacacggccctgctctgcttcgccacgcaccactttgatcaggtctttacgacgctcttcggtcagcggaggcagcggaacgcggatcacggtgccagctgaagatgggttcagacccaaatcagaagacatgatcgctttttctaccgcggcgttcaggctgcggtcaaatacggtaattgccagcgtacgggagtcttctactaccacgttggccaactggcgcaatggcgttgcgctaccgtaatattcaacctgaataccatcaagaatacttggtgaagcacggccagtacggattttatcgatatggccctggaatgcttctacgcacttacccatgcgcacttctgcatcttttttaatttcgttaatcacgttgcgaacccttgtaaactggttacttggcaggctataccttgcagcatagccggtgaatatgtaaaccagcaattgctggttaaaagggactcagcgcacaattacgtgaagcccctgattagaacggcgctatttagcgatcaacgttccttcgttttcacccatcacaacacgacgcagcgcgccaggtttgttcatgttaaatacgcgaattggcaagttatggtcacgagccagcgtaaaggcggcaagatccatcactttcagttcacgttctaacacgtcttgataggttaactgttcgtacagcgttgcatcaggatctttcacaggatcggctgaatacacaccgtcaactttggtggcttttaacaccacgtcggcttcgatctcgataccgcgcaaacatgccgctgaatcagtagtgaagaatgggttgccggtaccggcagcaaaaatcaccacgcgattgtgacgcagtaggctgattgcttcagcccagctgtaattgtcacatacgccgttcaacgggattgccgacatcaggcgggcgttcacataggcacggtgcagtgcatcacgcattgccaggccgttcattacggtagccagcattcccatgtggtcgcccactacgcggttcatcccagcctgtgccaaaccggcaccgcggaataagttaccaccgccaattaccacaccgacctgaatacccagttcgaccagctctttgacttcctgagccatacgatccaaaacgctagcgtcgataccaaaaccttccgcgccttgcagggcttcgccactcagctttagcaggattcgctgatatacgggttttgcattggttgccatggtgttctgtcctaagcagcagtaatagtattggggatttgaccgtcatacattcaaaacacctataagtgcgctgaaagtttacggactaaattctagattggataaaatggaaccgcctgttggcggccccatttttaagcattaagactgtttgctcattgctgcaacttcagcagcaaagtcagtctcaactttctcgatgccttcgcccacttcaaagcggatgaagttgatcacgtcagctttatgctctttcagcagctcgccaacggttttgcttgggtccattacgaaatgctgaccggtcaaagaaacttcgccggtgaacttacgcatgcggccttcaaccattttctctgcgatttcgcgtggcttgccagattccatagcgatgtccaactggatttggtgctcgcgagcaacaacttcagcagggacgtcttctggtttaacgtattctggtttgcttgcagcgatgtgcatagcgatgtgcttaaccagctcttcatcagcaccggtagcggcaaccataacgccgatacgtgcgccgtgcaggtaagtccccagaatgtcgccttccagagcagcaacacgacggatattgatgttttcaccgattttagcaaccaggttagcgcgttgttcttcgaactgtgctttcagcacttcgatatcaacgattttgccagccagtgctgcatcgataacttcgtcgccgaatgctttaaagccagcatctttagcaacaaagtcagtttcacagttcagttccagcatcacgccgaatttgccgtctgcagaaactttcgccaggatgataccttcagcagcgatacggcctgctttcttggcagctttagcctgaccagatttacgcatgttatcgatcgccagctcgatgtcgccatcagcttcaaccagcgctttcttacattccatcatgcctgcggcagtacgctcacgcagttcttttaccaaagcagcggtaataacagccatttcaattttcctcggttctctcgtgaagatagttctcactgtagatacgcaaagggggcctataaaaggccccctaaccaacatatttcaatacctggttaataagggctcagtgacgagcctgtcttattattcagcttctacgaagctttcttccgcttgaacggccagatcttgagaacgaccttcacggacggcggcagcaacagcgctcagatacagtttaactgcacggattgcgtcatcgttaccagggataatgaagtcaacgccatctggatcggagttggtatcaacgatagagaataccgggatacccaggttgttagcttctttgatagcgatgtgttcgtgatcggcgtcaacaacgaacagtgcgtcaggtaaaccgcccatgtccttgataccgcccaggctgttttccagcttgttcagctcacgggtacgcatcagagcttcttttttggtcagcttttcaaaggtgccgtcttgagactggatttccagatctttcaaacgtttgatggactgacgaacggttttccagttagtcagcatgccgcctaaccagcgatggttcacgaagaactggtcgcagttatgagcagcttcttttaccgcttcgcttgctgcgcgtttagtaccaacgaacaggatcttacctttacgggaagaaatcttggtcaactcagccagagcttcgttgaacattggtacagttttttccaggttgatgatgtgaactttgttacgtgcgccgaagatgaaaggcttcattttcgggttccagtaacgagtttggtgaccaaagtgaacaccagcctgaagcatgtcgcgcatggaaacagttgccatgattaaaacctctatatttaacgattggggttatgcctccacgtgtcccataacaccgaccccacaagcctccgctataagacagcgactttagggcaccccggtgtatgtgccgacacgtgtgtgttatttacacatatgagtgcgattagtactacttggctgaagactcattgctgccctaaggacaaatgacgcagagcggatcgccggcgcgctttataccataatccggcaccatacaccaacttttgttgcatttcgtggcagcataaaaaggaaagtttggcagcaatttgctgggctggtaccatgtgcaacagcattttttacttatttaatcataacagcggccacgctctggcccctgtggaccttttcttcatggctatcacaattaaaacacctgcagatatcgaaaaaatgcgcgttgccggccgcctggccgccgaagtgctggaaatgatcgaaccttacgtaaaaccgggcgtaacgaccggcgaactggatcgtatctgccacgatcacatcaccaataagcagcaggctatttccgcctgtctgggctaccacggcttcccgaaatcagtctgtatttctgttaacgaagtcatttgccacggtattccaagcgacgataaagtgctgaaagacggcgatatcgtgaatatcgacgttaccgtaatcaaagacggtttccacggtgatacgtccaaaatgtttatcgttggcaaaccaactattctgggcgagcgcctgtgccgcgtcactcaggaaagcctgtatctggcgattaaaatggtgaaaccgggcattcgtctgcgcaccttgggtaaagagattcagaaattcgtcgaagcggaaaacttctccgtagtacgcgaatactgcggccacggtatcggtgaaggtttccacgaagagccacaggttctgcactacgatgcagatgacggcggcgtggtgctgcaacccggtatggctttcactatcgagccgatggttaacgccggcgattaccgcattcgcaccatgaaagacggctggacggtaaaaaccaaagatcgcagcttgtctgcacagtatgagcatactattgtggtaactgagaacggctgcgaaataatgacgttgcgtaaggatgacaccatccccaacatcataacgcacgagtaatgacgacaagccggcaatcgccggcttttttatgggctgcgttttatatcaggaacccctatgtctgaccacaacactgaaaaccctctcccatcggcatcagtgagggctctccctgagcagcctgcatttcccagcacttattctgatagcgaactccactgccaaccgttgaaacaacgtctggaaaccttccagaactggctggccgacgccttcaatgcaggggtgagcgcggaaaaactggtggcagcccgtagcaattatattgatgctctattacagcgactgtggtcattttatggctttgagcatattccgcagaccgcactggtcgccgttggtggctatgggcgcggcgaactgcatcccctgtccgatattgatgtattggtattaagcgagcagcgtttaagcgatgagcaggcgcagcgcgtcgggcagcttattaccctgctatgggatttaaaactggaagtcggtcacagcgtacgcagccttgaagagtgtctgctggaaggcttggctgatttaaccgtcgccaccaatttgatcgaatcccgcatgatttgcggtgatgtcgcactgtttttgcaaatgcagaaacacattttcagcgacagcttctggccctcacccgaatttttcgatgccaaaattgccgagcaacaagagcggcacaaacgctaccacggcaccagctataatctggagccggatatcaaaagcagccccggcggcctacgagacattcacaccttgctgtgggttgcccgccgccactttggtgccaccacgctgagtgaaatggtcgagttcggtttcctgaccaaagcggaaagcaacgagcttatcgaatgccaaagcttcctgtggcgcatccgttttgcccttcatctggtcttaaatcgctacgataaccggctgctgttcgaccgccagcttagcgtggcacaactgcttcgttatcagggagaaggcaacgaaccggtggagcgcatgatgaaagatttttatcgtatgacgcgtcgtgtcagcgaactgaacaacatgctgctacagctattcgatgaagccatactggcactggatactaatgaaaaaccacggcctttggatgatgatttccagctacgcggcaatctgattgatctacgggatgagcaactgtttatccgccagcccgaaaccatcatgagaatgttttacctgatggttcgcaatcaggatatcatgggaatctattccaccaccgtgcgccaactgcgccacgctcgccgccacctaaaacagccgctgtgtaccattccagaggctcgtaaactgtttatggctattctgcgccatccgggagccgtttcccgcgccttactgccaatgcaccgccacagcgtgctgtgggcctatatgccacagtggggcagtattgtcggccagatgcagtttgacctgttccatgcctacaccgtcgatgaacacactattcgggtattacaaaaactggaaagcttcgccgacgaatcaactcgtccgcgtcatccattatgcgtagagctatatccgcgcctgccgcagccggaattactgttgctcgccgcgctgttccacgatatagccaaagggcgcggcggcgaccactcaattctcggcgcgcaggatgtgctggaatttgccgaattacacggattgaactcgcgggaagctcagcttgttgcctggctagttcgttgccatttattgatgtcagtgacggctcagcgtcgtgatattcaggacccaacggttattcagcaattttctgccgaagtacaaagtgaaacgcgcttacgctacctgattagcctgacggtggctgatatttgtgccaccaatgaaaacctgtggaatagctggaagcagagtttattgcgcgagctatatttcgccactgaaaagcagctgcgacgaggcatggaaaacagtccggatctgcgagagcgcgtgcgccatcaccgcctccaggcgctggcattactgcgaatggataatattgacgaagaagcgcttcacagaatctggagtcgctgccgcgccgattatttcctacgccattcaccaaatcaattagcctggcatgcccgtcacttacttgagcatgattccaccaaacctttggtgctagtcagtcgccaggctacgcggggcggcacagaaatctttatctggagcccggatcgcccttccctattcgctgccgtggtgggtgaattagatcggcgtaatctgagcgttcacgacgctcagattttcaccaatcgtgacggtatggcgatggatacctttatcgtgctagaaccggacggcagcccgttggcgcaggatcggcatccggtaattcgtcatgcgctggaacaggcaatgacacagccgaactatcagcatccgcgggtcagacgtttatcgcccaaactgcgtcatttcagcgtgcctaccgaggctaacttcctgccaactcatacagatcgccgtagttatctcgaactgatcgccttggatcagccgggattattggccagagttggggaaatatttgctgatttgggattatcacttcacagcgctcgcatcaccactattggcgaaagagttgaggatttattcgtattagcagataaggatcgtcgggcattgaatgccgaaacgcgaaaggaattagcacaacggttgacagacaccctcaatccgaacgataaactgtgatacaaataactttttaacgattattttttcttacaacctttcaacttcaggaaagagaaccggatgcagcaactacagaccgttattgaaaacgccttcgaacgccgtgcagagatcactccggctaacgtagacaccgtaacgcgcgaagccattaaccacgttatcaatctgttagataccggcgcattgcgcgtagcggaaaagattgaaggccagtgggtaacacatcaatggctgaaaaaagccgttctgctctccttccgcatcaatgataaccaagtgatggaaggtgcagaaactcgttattacgataaagtcccaatgaaatttgctgattacgacgaagcgcgcttccagcgcgaaggcttccgcgtcgtacctccggctaccgtgcgcaaaggcgcttacattgcccgtaacaccgtgctgatgccttcctacgtcaatatcggcgctttcgttgacgaaggcaccatggttgatacctgggcgacagtaggttcttgcgcacagatcggtaaaaacgtgcacttatccggcggcgttggcatcggcggcgtattggagccattgcaggctaacccaaccatcatcgaagataactgcttcgtaggcgcacgttcagaagtcgttgaaggggttatcgtcgaagaaggctccgtgatttccatgggcgtattcatcggtcaaagcactcgtatttacgatcgcgaaaccggcgaaattcattacggtcgcgtaccggctggttcggttgtggtttcaggtaatctgccgtccaaagacggtagctacagcctgtactgtgcggttattgtgaagaaagtcgacgcaaaaaccttgggtaaagtcggcattaacgagttattacgtaccatcgactaacattcaactagcgggccaatcagcccgctatttttttgtcttgtaagcagttatcgcctgcaatcacatattatggcaacaataaccgccataatagaaactgtggaatataaaaccaataaggtggcgctatgtatgacaacctgaaaagcttaggaatcactcaaccggaagatgtcgatcgctacagcctgcgtcaggaggccaataacgacattctgaaaatttatttccgcaaagataaaggcgagttttttgctaaaagcgtcaaattcaaatatccgcgtcagcgtaaaaccgtagttgcggacaacgccggacaaggttacaaagagattcacgaaattaacccgaatctgcgttatgtgattgatgagttggaccaactttgcaaacgcgatcaagttgaagtggacttgaaacgcaaaattctggatgacctgcgtcatttggaaaacgtggttgctcacaaaatctctgaaattgaatccgatctggaaaaactaacgaaaagcggccgctaatacctgcccataatccgttaggaacaagatagacaatcacaaaacaaacagtaaaaagtggcgatatctgttcgccacttttatttacatcaatttatttacgctgagcgtgtgagcacggctacggctggattccaacccggtttatttcagcaactggccccattgctctacccacgggcaggaaaccgcctcaggctccggctgctcaatcgcatcaatttccaagatctcgccgatacgcgtcgcgccctgctcctgcaataaagcgtcaaaagcacgacctgcgccacagtagttatcgtagctgctatcgcctaatgcaataacgccgtagcgcagctcaggctggtaaccaacctgatcgcgcacagcctgaaacaacggcgcgatattgtcaggaaaatcaccttgcccagtggtggacgtgatcactaacgcataatgctggcgataatattgccaggcttccagcgtaccttcgtcaaatagcttaacttcgtggccttgctcattcagtatgttttcagcttcttccgcaactaaaagcgcattgccataaaccgtaccgacaaaaatacccacctgagccataaaaaaccttctttaaattaccaataagttactcactatcctgaccttcgtcgccaagaaactcaaccctttcaagctcagggagaaggccttcccagccaaattgtgacatcacgccctgccaggcactgtcccagcgcgcagatagcgccaaggattcaccggtgaccggatgattcagcgataaatggctggcatgtaacattaaacgtgagcaatcaaaatgttgcgacattccgcgattctgacgtaaatcgccatgcgtgctgtcccccagaatcgggtgacgaatatgcgccatatgacgtcgtaactgatgtttacgcccggtttccggagtcagttccatcaagctgtagcgagcggtttcgtagcgaccaatagcaaccggcatctcggctctcgctaacgcacggtaatgcgtaatcgctggttttggcgctttatcccggctggcaaacttatcggcaattttgtccaactcttcggtcaaagcgtagtcgagagtgtcgtcttctaacacataaccgcgtacaaccgcatgataaaccttcttaacttcatgttgttcgaactgttgtgacaatgcgcgtgccacttcgctagacagcgccatcaacaatacgccggaagtcggacgatccaaacggtgtagggtatacacatgctgtccaatttggtcacgcaccgtttgcatcacaaaaacggtttcattacggtcaagccagctgcggtgtaccagccaaccggcaggcttattaaccgcaacaatatgttcatcttgataaagtatttcgagcattattcgctttctatgtttaacaggtcatcgagacgctgcaactgcgccagaagaagactgcaatccgtctgatgatctttcaacgccacctcaaaataaggcgttacggcaaagcgggtcggtaagggagcatttttttctagcagcgcattcattcgcggtagcaatacccactgaagccattgctcagcggccatggtatcgacgcaaaaaggctcaacgctttcaaaggcctcagcctcaggcggagatgactgccaaagattaatggtgcgtaatgccagatcgatatcctgtaaaatctggcgtacctgattgtttagactcatgttttaattctcgaccaaaaatgggccaacacaggccagaaaggaaggttcactccagataatccggatgaaaacaaaagcgcgcaagcataccatcgaagcgcaggagacccaactatcggctaactaaatccgctatcagtaaactaattaaaggaagcgagcctaagccgcagtgaaaaaaagcataaaaaaaggggtactgtttgaccagtacccctctgttcgttttatagcaatccagctaaattgatgctccctgctcaatccttgaaaacttttcctgcggttatcctaaccagcaatccttcgcgatgtcctacaccatcctggtgcgatccttaggtcatcctaacccaccaataatcctttatcggctccctatctccatcctggaggtgtcccttgtttcgtcctaaaacatcccttcactcgtcctgagcagtccctgatttccttcatcctgaagctgcatcatcccgatgctgttcctttccaaccagatcctatctggtgaataaaggatcgcttaattggcgaacagagacaagatactgtaaagcctcttatctatacgttttaatagacaaaaaattgaatgtttataacggagtgattttattgagaataattctcacgcaagaaaatcatcttcaaaaaatagaagctatgtcttacaggccgtgtgagagatctctcacacggaaatcagataaccttaattaaattaaggtttagattggcattactgggcgcaatgcatcgaggaaatggctcaggttggaggctaaaagcgtacgttgattactgccaaagtgctccaaaacgacattgccagtaacgttgcacagcgatgccattgtcatttcagattctgtcgttgccagaaacagcgtcggggacagtttgagccgtttttgcgtaaccaaatgaccgataaggttttcctgtaatcgagtaaaatcatcctcactccatacctgcaacagagtaaaacgatgatcgcccaactccgcggtcatatctcccgcatactgctgcgtgtaaaaggtatgaatatcgtcatgtaactggatttctaacgcgcgagccacgttttctaacgttgctgccggcaagaatggctgcggaagccaataaatctgatcctcgtgcgtttccgtgatacaaggcgaagccaccccgtacaactcgtggctggctggcgcatgggcggtttgctgctgccatagttcaacgtagcgctgcgtaaagctctgtagagcggttgaaacattctggtccatattttctctcaacatccgataagcctgcgctaaactgggaaacgaaacttcgccttcagcgacaatgcctagcgcggcataaatggtaaactgtcggctattgtaccgatctctcacctagggaacagcatgtcttcatatcaagatcatcaggctctggccgaactcactttaggtaagcctaccgcttaccgtgaccactatgatgcggccttgctacaggcagttccccgcagtatgaatcgcgagccgctgggattatatcctgataaccttcccttccacggcgcggacatttggactatgtatgagttgtcctggctcaatgccaacggcttgccgcaggttgccgtcggcgaaatcagcctgaatgccgatagtgttaatcttatcgaatccaagagttttaagctgtatttgaacagctttaaccagactccgtttagcgattgggaaagcgttcgccatactttacaacaagacctatctatctgcgcgcagggcgaagtcagtgtcacactctataaactgagtgatatagccgggcaacctattgctgatttccatggagaatgtctggatgaacaagatattcgcatcgataattacgaattcagcaccgattatctgaaagatgccacgggtcaacagatcgttgaagaaacgttggtcagccacctattgaaatccaactgcctgatcactcatcagccagattggggttcggttcaaatccgctaccgtggcccacaaatcaatcgtgaagcattgttgcgctatctggtttccttccgtcatcacaatgaatttcatgagcaatgtgtggagcgtattttcaacgacttaatgcgcttctgccagcctgaaacgctgtcggtctatgcccgctatacccgccgcggcggcctggatatcaacccttggcgcagcaataccgacttcactccgtcgaacgggcgtttagcgcgtcaataatgcgtgccattacgcaacattggcagtaaaaatctcgttagtattggcaaaaaacaagggacaacgttaaggtgaattgaagtgtgttacggcaataatgaacgataaagactgccgtcacctgaagaacaatttatgtgatatttcaatggagacatcgagagcggagctctggtacgcaaaaaagcgagatcataaagagaatagccgctctctggtgcaatgcagttacgacggcccctctgcggggcgtaaaggagtcattttgattacacatattagcccgcttggctcaatggatctgttgtctcagctcgaagttgacatgctaaaacgcactgccagcagcgacctttaccgcctgttccgtaattgctctctggcggtattgaattcaggtagccagaccgataacagcaaagagctgctatctcgctacgaaaactttgatatcaatgtgttacgtcgcgagcgaggcgtcaagctggagcttgtcaatccgccagaacatgcctttgttgatggacgaatcatccgttcactacaagctaacctgtttgcggttctgcgagatattctgttcgtgaatggtcagatcgtcagtgccggacgtttccagcacctgaatatggaaaactccagccatttgaccaatctggtattttctatcctgcgtaacgcccgcgcactgcatattgatgaagatcctaatatggtggtgtgttggggcgggcattctatcaatgaaattgaatatctgtatgcccgcaaggtcggtagccaactgggtctgcgtgaactaaatatttgtactggctgcgggccaggtgcgatggaagcgccgatgaagggcgcggcggtaggccatgcgcagcagcgctatagacaaggtcgtttcatcggtatgaccgagccttcaattattgccgctgaaccgccaaatcctctggttaacgaactggtaatcatgccagacatcgaaaaacgtctggaagcctttgtacgcatagctcacggcattatcatcttccccggtggcgttggtaccgcagaagagttgctctatttgcttgggattttgatgaatcctgaaaacagcaatcaagttttacctttgattctgaccgggccaaaagagagtgaagattatttccgggtattggacgatttcatcgtgaatacattaggagagaaggcgcggacttactatcagattattatcgacgatccggacgaagtggctcgccaaatgaaaaaagccatgccactggtgaaagaaaatcgccgaaataccggcgatgcctatagcttcaactggtctatgcgcattgaaccagacttgcaattgccatttgaaccaacccacgagaacatggctgcactgaatttataccctgatcaaccggcagaaaagctggctgcagcactacgtcgggcattttcaggcattgtggctggtaatgtaaaagaagtcggcattcacgccattgaggcttatgggccttataaattacacggcgacccacaaatgatgaagcagatggatcatttgctacagggctttattgctcagcatcgaatgaaattaccgggcagcgcatatacgccatgttatgaaatctgcccttaaacgcgagcggctacgcgtgctcaataaggtttaagcggcagtgaggataatccccgatacttagtcattctaagtatcgggagagtacggggagtaataaagtcgatgcgatagcatgacgtatcagaagtatcagaagtatcagaagtatcagaagtatcagaagtatcagaagtatcagaagtatcagaagtatcagaagtatcagaagtatcagaattatcagaattatcagaattatcagaattatcagaattatcagaattatcagaattatcagaattatcagaattatcagaattatcagaattatcagaattatcagaattatcaataataccgattttattttcacccacacaatttcgactatcaggactcttgccttcaggttatggatatacaccttcttatcgttgacgctctcaatctcattcgccgcatccatgcagtgcaaggttccccttgtgtaaatgcctgtacccatgcattacagcaacttatttcacacagccagcctacccatgcggttgccgtttttgatgaggatgaccgttccgatagctggcgccaccattgtttgccggattacaaagcagggcgatcgccaatgccggataatttacagcaggaaatgccgcagcttagacaagcttttgccgaactgggcgtcccctgctggcactctcccggcaatgaggccgatgatttagccgccacgctagcagctaaaattgccggagccggacatcaggtcaccatagtttctaccgataaaggttactgccagttattggtgccaaacgtacagattcgggattactttcagaaacgctggctggacttaccattcgtcaaacaagagtttggcgttgccccacatcaattacctgattattgggggctagccggtatcagcagcagcaaaatccccggcgtagcagggataggcgctaaaacggcagcggtgttattgcaacaggtcaacagcctggaagagttatatcaaaacctagaacaggttccggaaaagtggcgaaaaaagctgcaacagcatcaggacatggcctttatctgcaaacaggtagccacgcttaaaacagatttaccgctgaacggtaacctgcaacagctacgcttaggccatagttaagggagcaatcggcctaatgctggtcacttaaggtgaccaactgcctttttatccgagctggtaagattacgggcatgctcaggaaaagtgagattgataatgccgagggcttgtgaaagttccattaaaaagggttcatgcagagacatgaacccttttacatcaaccaacggatcggtcaaccgctcattaaacgatcggcattagccaatcgcccccctgattttacatcttagctattgaatctctgccgttgacccgaaggttttaaagatcggggtttgaacgtttaattttgaatcccgagcgcccaatcactcacgtttggctgtgagtgaaatcatagatttagctttaaccaacaactaaatacgttcatctctacgacctggaacgccagcccagatacgacgaacatgcacggtcacttcctcacgatcgtgataaagctgtttagcctgaatatgcgcattaataccgttttctttcaactgttcatccatcatcgccaggttttgcaacacttcttcgtagcgctttttcattggcaatttaagattgaaaattgcctcacgacaccagccattgaccagccagtcggtaatcagctgcgttactcgcgctggcttttcaaccatatcgcaaaccagccaatagatattgctgcgcgttggctcatatttgaatccgtccgcacggtgatgagtcacctgcccggtatccatcagactctgggccatagtgccgttatccaccgcctgcaccatcatgctgcgttgaaccagctgataagtccagccacccggacaagcgccgagatccaccgcgtgcatgccgcttgccaagcgttcttcccactcatccgcaggaataaattcgtggaaagcctcttccagcttcagcgtcgaacggcttggtgcatccgaagggaatttcaggcgcggaatccccatatacagaggagagttgttgttactgtaggaataaccgacataacagcaaccagaagcgataaagaatacgtgaaccaccggacgatgcggattttcacgagtctgcaaaatcttctgttcacgcatcgcggcacgcagcggcaccgtcagtttgcggcagaatttaagcaattctttactctcattggtgtccggcacttcaactcgcagttcaccggctttttccaccacgccgaccaacatccctacgatcggagacactcggtcttccggcggcagatcctttagcagttcgccaacaaccatcatttgccgagcaaaaatcagctctttaaacggcagctcgcgaatcaggcgatccgcatcttcatgctggtaacactcgaataagacataaccgctattatcttttacccgagcaaaaccaaagacttcgtgttctgcggccttggcggtaatttccgccgcacactctttttcaaagccttgacggcaatataaagcaattttattcatggcgttctgcccttttccgtagacgcagcgcgccaatcaacatcaaaatccatcccgccagaaagcatacgccgccaatcggcgtgacatatacccaaagtttcaggtgcgatagagccaggcagtagagactgccactaaataacacggtgccgagggccaataaagcgccgctccagtaaaaccaaatactgatctggcgctgcatagcaacggccaaagcgagaatagccagagtatgaaatccctgatattccaaaccggtacggatccaggccatttcatttacgcccagacttccgcttaatacgtgtgcgccaaaagcaccaaaagcgacatagaaaaaaccgctgatagcggcaaagatcagcatcaaacgaccactcatcgttatttaccttattttatagatagttaccgtggtgaaattaggtaattttgcgttttttcacgatcaattttcgtagcggaatcgtaatttctcttgttcactggctgcccgagccagaatccactgacgaaaggcagctattttacccagttctgcctgactgtcatgacaaaccagataaaaagcatttttacttaccagaacctcattgaacggacataccaaccgccccgcttcgatttcggtctgagccatcacattattcaccaaagcaataccctgaccgtgaaccgcggcctgaaccaccatggcactgtgactaaaaatcggcccctgctgcacattaatttgcggaacgcccaactgacgggtataggccaaccagtcgcggcgggaagtatcatgcaacaaagtatgattagccagatctgccggcattttcagcggatgttcgcccattagcaggctaggagcacaaactggcagcagaaactcggcgtacaatctttcggtgcgcagccccgtccagttgccgcgaccgtagaaaatagccacgtctacatcatctgccaatttatcttcttcacggtcaacggcctggattctgacgtcaatccccggataagctgagttaaagctagataaacgcggaaccaaccattgaatagcaaaactcggcggtaaactgaccgttaatgcccccttggcgctacgggcctgtaatttgcgcgtagcttcgttaatcgaagtgaaaatttctttaatatccaggtagtaactttgcccttcttccgtcagcagtaaggaacggttacgtcgacggaaaagcttcaggcccagaaagtcttccagagatttaatctggtggctaacggcggcctgagtgacaaataattcatccgccgccttagtaaaactgaggtggcgcgcggccgcatcaaacacgcggagagcattaaggggtggcaatcgttttgacatgaattggatacttttttataacggctcatccgcggatgaaaccctttgtttacttattagtttttgtaatgcgagccattataaattgtccgttgatgatgcgccagcaaatacctatagtggcggcacttcccgagccggaacgaaaagtaagtttagtatccaggtactgaattgcttttggctttgtggttgtgatgttgtgtttgcaaatggtctggaatgccagacatagtagctaagctactgttttttcacttcctgtacatttaccctgtctgtccatagtgattttatgcagcaccgccccataaagcggtgcttttttttatcttaagtttaagcttcactgcgcgttgcacgtcagaaaagcttaaacttaatcaggtagtcaggctaaaatccgccggtattatttcccttccgccatttcttttacttcggaacggttaatttgctgttctgtgccgttggcatcaatgtaactgatcataccggtatcattatcgactttaggtttaccatcggcgacgatggtgcgaccatcattggtatgcatgacatagttgcttgagcaggctgcgagagtaaaagtaagcattaaagcggaaagtacggcagctgtctttttcatggatcactccttgcagattaaaatactgaaaaaaataatttagattattaaattaattattcgccagacactattcagcataacaaacttattacatatttccatgaatctgggcaattagcgggctaattacccgttaaacaccgaaaaataagaatgatcttagcttttcagaggatttgagcactgtatgaagtcttttaaccccgcagcttttcgcgcagaattcccggctatcaatagttcgggaatttacctggatagtgccgctaccgcgctgaaaccccaaggggtgattgatgccactcaacagttttatgcgcaagatgcggccacggtacatcgcagccagcatcaggccgctcgttccctgaccttgcgttttgaacaagctcgtcagcaagtcgctgattttattaacgctcctacggcagaaaatattgtctggaccaaaggcactaccgaagcgattaatctgatcgcgcaaagctacgctcgccctcgcctccaacccggagatgaaattctggtgagcgaagcagaacatcatgccaatctgattccctggctaatggtcgcagagcaaactggcgcaaccttggtaaaactaccgctgggcagcgactttctccctgattttcagcagctacccgcgttattgaccgggaaaacgcgcattttagcgctggggcaaatgtctaatgtcaccggcggtatgcctgatttggctttggctatcgatctggcacacagtaaaaactgcatagtggtcgttgatggtgctcaaggtgtggtacacagcccggcggatgttcaggattttgatattgatttttatgttttttctgctcataaactctatggcccgacgggaattggcgcgttatatgccaaaacagaactgctggaagaaatgtctccttggcaggggggcggtaaaatgctgactcaagcttccttcgccggttttactccgcaggatgctccttaccgtttcgaagcaggaacccccaatatcgccggggttatcggcctgtccgccgcacttagctggcttgaaaatattgatattgaagcggcagaagaatacagcagtggtctggctacgttagcggaagaaaaactgagcaaactggacggatttcgcagttatcgttgctctcactccagcttgctggcttttaactttgacggagtacaccacagcgatttggtaacactgctggcagagcaaggtatcgctctgcgcgccggtcagcattgtgctcagccgctaatgagtgcgttgggtatcagcggtagcctgcgagcctcgttcgcgccctacaatacccgtgaagaagtagaaagcctctgctcagcgataactttcgcgctaacattattgcaggattaatgaaaacctcaggaaaagctgaggctcactgaatagaaaagagaagaaaatgaccgccccacatccatttggccaagaagttacccgcgacgaccttatcgagaaattcagtactctgaaacagtgggaagatcgctaccgccaactgattttgctggctaagcagttaccgccgatggatgaatcgctgaaacaaactgaattcgaactgtccggctgtgaaaaccgagtctggcttggccacgaacttttggcggatggccgactgcatttttatggggacagcgaaggccgaatcgttcgaggtttactggcggtattactgaccaatgtggaagggaaaacgccccaacagattttgaatcaagatccgttagatttgtttgatcgactggatctgcgccaacagctaagcagttcccgcgccagcggtttacaggcactggcgcagggcgttaaaacgattgctgctcgctatcagaatccgatttagaccgcctcaagttgtcgcgccgcttttgccagcatttttttcagggcatgagagaccgcaacaaaaccgaaggtggcggtgaccatagtcaccgaaccgaatcctgaggcgcaatccatctttttagggccttccgcagtgctgcgggaggcacagacggaaccatcaggttgcggataaaccagcggttcagtggaaaaaacgcaatcaatcccgagcttacctttgctgtttttcactacgttataatcgcttttcagcctttcacgcagtttagctgccaacggatcctgaatcgtcttggctaaatcaacaacttcaatccgagttggatctatctgaccgccagcgccaccggttgctataaccggaattctatagcgacggcaataggccagtaatgccgctttgggacgaatgctatcaattgcatcaatgacatagctaaagtttcgatccagcatctcagccacgttgtctggcgtaataaagtcatcaatgcaggtaacctgacattcagggttaatcgcccgaatacgctcggccataacctctgttttagactgccccacatattgtctcagcgcatgtacctgcctgttggtattggttacacacacgtcatccatatcaatcagagtaatggcaccgataccggttcgggctaaggcttctgccgcccaggaacccactccgccaataccaatcacgcaaacgtgagcctgcgaaaataccgccagcgcctgttgaccataaagacgggctatgccaccaaatcgctgttgataagcttcagaatacagtgtgctcataaccttatttgtaccttatagagaaataacctaaaaccagtctacgaatgcaaaagcggccaattggccgcttgataagctgtgactgtaaacagagtcacgccatgagtcgcctagttgttcactaaaagcgaagagctggaaggcgtgttagctttatcacctttataagcggtaaacattgggccaccgctttgagcatttttcagcacccatacacggccataatggttatagaaaccagcagcctgaccggcttcatgaccaataccctgataaatatcgaaatgctgacctttgattgctccaccgacgtccagtgcaaccatcaggcgcatttgatattgcccggtaaatttgccctgttcgtccagcagcggcacttcggccagcagcgttgttcccgcaggaattaatgaacgatccgatgcaacggaagctttcgcaatcaatggaaccgcgctcgcaccttttaccggggcgtacatttccggtttaaagaacacaaaggacgggttctgctctaataactctctgacttcagcttcactgtgcgtttcagcccatttacgaatagcctgcatcgacatatcggccttagcgacttcaccgcggtcgatcagcactttcccaatgctgcggtaagcatggccatttttgcctgcgtaaccaaagaaagtcagaggccgcccatcaccaaaatctacgtaaccgctgccctgcacttccatcataaagttatccatcaacgaattggtgtaagcgataactaaattgcgatcatccaatgcgcccgcgtagattccggcgcgatccggcagacggcctttgccttttttagatggcatacggtacagaggatgacggaattctccttgcggcgtatagcgagcttgtaaaaccggagtgtaatagccggtaaactggacgtttccaaaattatccaccccttccatttgataagcgttcaaaccaaacaggctgagtttgctggtatccgcacccgctaacatccagttttggactgcttcaaaagtattactgtggcggttgtaaagattaggtgaagcctgattaatcactttcacctgatctgaataatcttttgcgttgaccggcttacccgtggcgctgggttcattcaccagttccagagaatggctcaatcgaccatccttatattgttgaccacgatcggtgggccgtgactgacaaccagccaatactgcaatcattaatccgctcagtaggtatttgccccaacgtcctttcattacacgccttcttatacacacattttatcttccggctgaacgataacaaacgcctatggataaaggaatcagtagccacaaaaaatcatatactgactcatattgcccattacgtagaaaaacaaaccacatagttcacaaattagtcaattgattgtctttatgcagtttaaatgccaaaagcacttgcaagaaatgtgatccagagtatagtgcgctgaatcggacgcggggtggagcagcctggtagctcgtcgggctcataacccgaaggtcgtcggttcaaatccggcccccgcaaccaaccgatactgattaccagcagtatcaaatgtcgtccgatagtcttgaaataatagtaaaataagttgttagacggacgcggggtggagcagcctggtagctcgtcgggctcataacccgaaggtcgtcggttcaaatccggcccccgcaaccaacaacttgatagtcagtagaaaataagcattaagacggacgcggggtggagcagcctggtagctcgtcgggctcataacccgaaggtcgtcggttcaaatccggcccccgcaaccaattcttaatcacagttttctaactcaagacaccctcaagggtgtttttttgtttctggcctccggaaactaccctatcccgtctgacttccctaatgtatttccttactccattcccaatcagccaatccttggaccgataaattccaaagcgccttaataccattcccagcgccattacacccgagcaactgccccaccgttagcaaagtaagctttgattccggcaaatacagattcagcaatttgttgttggaaatgactggtacgtaatttacgttcttcttctacgttactgataaaggcggtttctaccagaatcgaagggatatccggcgcttttaatacggcaaatccagcttgatcaactcgatttttatgcagtttattaattttacccaatcgatgtaacacttctttaccaaattttaggctgtcgttaatcgtcgcggtctgtagcaggtcaatcatggtgtgatccagatagcggtcgccgcttttactgacgccgccgatcaggtcagcctcgttctgggtttgcgccaggaatttcgccgccgtactggttgcacctttggtggataacgcaaataccgacgaacctcgagcggctctattggtaaacgcatctgcatgaatcgaaataaacagatcggcgcgctgcttacgggcttttgccaccctgactttcagcgggataaacacatcttcatttcgcgtcataaatacccgcatatttggctcacgctgaatcagcgcgcgaaggcggcgggcaatttgcagcacaatgtctttttcgcgagttttgtttttccctattgcgccagggtcttcgccaccgtgcccaggatccagcataataacaatcgggcgatcacgtcctgccttacccgcccgagccgattcggccggcaaggttcgctccacgttacctttgttgtaatcctcaagtagcgccaacaaaggatcgtcttcctcggaaacgcctcccttagcgggataaagatcgacaaccagacggttacggaatttggaaacaggcttcagggtaaacagctgcgggctaatactttgcttgagttccaatactagacgcacggtatttttatcaaactgtccaacgcgagcctgctttaagtaaggatcgccagattggatttgctcaccaatctctttcagtacgctattgagatgaacgccttcgatatccaccacaattctgtcgggattcgttaaagcaaattggcgatatttaagtggcgtattcgattccaacgtcacacgggtataggttgaggaaggccataccctaacggcaactacctgagatgcggaggcaaatccaacctgactaacactgagtaaccaggttgcagctacgccttgcagtaaacggcgacgcgcgggattatgatctgaatttgccatggaactccaaagtaactaccaataaacgatgaaaaaacaaccaaaaaagataatgatggcaaaactttagcgaatcactcctcctctgtcatcagaaaacatttttatgttattcaatttattactctctcatagccatacacatgcatttaatagcaatttcttgcttgccttcacggccacaaaagaataaaaatacaaaaataccgaataaaaattcaaagagggtctgccgtgaaggaacgtagtactgaactggtccaagggtttcgccactcagttccctatattaatgcgcaccggggcaagacgtttgtcgtcatgctcggcggggaagcgatcgaacatgaaaacttcgccaatattgtcaatgacatagggctattgcacagtctagggattcgtcttgtggtggtttatggtgcccgcccacaaatcgacagcaatctcgctcagcataactatgaacctatttatcataagcatactcgggtaactgattcccgaactctggagttggttaagcaggcagcaggattacttcagttagatatcaccgctcgtttatccatgagcctgaacaacacgccactgcaaggtgctcatatcaacgtcgtcagcggtaactttattatcgcgcagccgctcggcgtggatgatggtgttgattattgccacagcggccgtattcgccgtattgatgaagaagcgattcatcgtcaactggatagcggggctatcgttctgatggggccggtggccgtttctgtcaccggagagagctttaatctgacctctgaagaggtggcaacgcagcttgcgattaagctaaaagcggaaaaaatgatcggtttctgctcatctcaaggggtaacggatagagatgggaatattatttccgagttgttccccaacgatgcccagaaacgcattgaagaactggagcaagaaggcgactaccactccggcacggtacgtttcctgcgtggggcattaaaagcctgtcgcagtggcgttcgtcgcagccatttactgagttatcaggaagatggagcactagtgcaagaactgttctcccgcgatggtatcggtacccaaatcgtaatggaaagcgcagagcaggtaagacgtgcaactattaacgatattggcggcatactggagcttattcgtccattggaacaacaaggtattttagtgcgccgctcccgtgagcagttagaaatggaaattgataaatttactatcatcgagcgtgataatttgactatcgcctgcgcggctctctatccattcccagaagaacacattggcgaaatggcctgcgtagcggttcatcccgattatcgcagttcgtcccgcggtgaaatgctgttaaagcgggtagccaatcaggcacgccagatggggctgaaaaagctgtttgtgttaaccactcgcagcattcactggtttcaggagcgcggttttactcccgcagaagtggacgttttgcccgttgagaagcaggaactgtacaattatcaacggcgttcaaagatcttgctggcagatctatagctcattgatataaatagcccgttgatataaataaatttgaatctgagaatttaaaaagcgcagctcgttaccggtaaagctaataatcgatggtacaaattattagtgggggttcgagctgtaacttttatttatgggcagcgcttatgtgtagatagatgtcgatgcgtagatgctgatgcgtcgaaacgacagatttcttatacgacgaacgtcaaaaaccaagcaaacaaaaaaatagcaacaaactgatttataacgatttatacatccccctgccgttactcttttttgatcatcaacataccaaaacattaactgaaagcccatcacctaacccttccgctgataagctttaccaggctttccatccgcttacgttgagatattgcgaccatttcccccattaaacatggcacccaaatcaccggctaaacgctagcgaattaagcgttccaccaaaccactgcgtcgctgagttggagtcaatattgcgctggtcaataccttatcagtgcaatagagcgttaagtgcttccgagcacgggttatcgccgtataaaccaattctctggtgactaccggaagaaaatggttcggtaaaactaacgccgtgtgctcaaactccgatccctgagacttatgcacagtcatcacataggctgtttcatggctgggcaaacgactcggttgtaccgatttaatgctgccatcaggtaactggaaatgaacgcgtaaatcgccttcagagtcatataaagcaataccaatgtcgccgttgaataacccaagggcgctatcattgcggtcaatcattacaggccggccaagataccagcgacctgatggcccaggaatccggcgaatcaatcctttctggttgagaatctgctcaattcgttcgttcagaccgctaacgccaaatggcccggttcgaagcgcacaaagcaactgataacgaccaaattcagtcaatataacagcgggatcggccccctcaaccacctgctgcaaataacgctgataaccgacgaggctatggtgtaatagaagttggtagtcctcagcgtcagataacgggaaatactcaatatcttcgaagttgccattcaatatggagagtgcctcacgaggcttacccgcgttgaccgctaacgccagttgtccaatgccggatttctcatcaaaacggtagcttttccggagcaaacacaggctatcgcgtatatttgccgcgttatcgatagcagttccagcaagctggcaaccggtcagacgcgtcagctcttctgcccgctttgggctataccctgactctaccagccggcagatatcccctaaaacggcaccggcttcaaccgatgccaattggtccctatctccgaggaaaatcactctagcctgcggtggcagtgccgcaatcaattttgccatcataggtaaatcaaccatcgatgcttcgtctaccaccaatacatccaaattcaacggatttccccggtgaaagcgtaaacgttggctattgggttgagcgccaagcaggcgatgtatcgttgaggcctgatcgggaaacagctttctttcgttttcactgagcggcagagcgctactggccttacctaatgattccgttaatcgcgcggcagctttcccggtcggggcagccaattgaatacgcaatcttttcacttcattcaattgcaccagcgccgttaacagcttggccaccgtagtcgtttttccggtgcctggcccgccggaaatcaccgaaattcggcgagtcacggcaacagccgcagccaccttctgccaatcgatttcactcgatgacgaaccaaacaggttatccagaatccctcgtaaccgtttctcatcgattggttcattcacttcatcacgggcaataaaatctgctacatcgccctcactctgccacatacgctgcaaatagaggcgttcctgctgtaatactaaaggcgtaggtaaagagccatcactgattgcatccgaattttctaacgcagcctgcaaatctgcagcatccggttcgccggcagcttgccataacgcatgagccaaatcgggctggcgcccgcaaaacagtcgttccggatgcaatctatctaaaggcaggcaaacgtgcccggctccggtttcagcgcttaaatatgctgctactaactggattaaaggagaattatcagtggcaatcatccgtgcaaactgaacgtctaacgggcgcaatagtttgtcgctaaccgcctgttccagcagcgttatcatactgactctccttctacgttcacggattccccgctaaataggcgatccattccttcaaccaaggcgatatccggccgacagtcaaaaacgccgtttccgggtttttggctgtcggcaccacgtaaaaagagataaatcacgccgccaaagtgccgctgatactcatagtcgggtaaacgatggcgcaaataacgatgcagagccaaggtatagagctgatactgcaaatcatagcgatgttcagccatagcctgttccatcgcctctctggtataggcgctgctatcttcccccagccagtttgatttgtagtccaacagataatatttaccctgccagcaaaataccagatcgataaaaccttttagcattccttgaacctgctggaaatccagcttggggcaacgggcggacagagggtcatagtacctgaccaaagcatccagttcatttggctgcaataaacgctcgataggtaggtaaaactgcagctctgcttgcttctccttcggtgataaatggctcaatgtcacgcctgtattgtttaacggcgtagtgaggatatcggtaatccattgatacaaaaccggttgccattcatcccctagcccctgctgctgtagttgctcagctaaccaggcttcgtcgaggggctgactgaagtccaaaggttccagtaaatcatgtaaaaaggttccaggcgcagcgcctcgcgggaaggtatgagccgtcaaacccgcttcttccgtaggcccttgttctccagcagcgtcggtgtccagcttcggtaatagctcctgaggtaacacatcgtctgccggaatactgatatttttggacgagccgtgttgttgtaaccccgaataactggttacacgccagttatcgaacattctgcgggagaaggtacgaccagccagctcgggcataggttcgttttgctgctgccactgacgatcatccagccgttcgaccacggtgaccgcaatatcctcatcggataattcagccagtttttcagccaggtaaacggcgtctcctgcctgcgcagcttgaaccaggtaaccgagagcactgagatgcatatcactctccccctgttttttccggccacctttaatgaggggagcaatacctatgctacagtgataaaccgagcgggtaagggcaacgtataacaggcgaagatcttcagctaaccgctcttcttcagccagttgcttactctcgtcactggcgttcaaatccagcagggcttcaaaattggttctatcgtggtacaacacatcctgttgctgcctgaaattgcccacaaaaggcaaccagaccaaggggtactccaatcctttcgacttatgaatggtgatgacctgcaccaaatggcgatcgctttcgagccttaactgttgattttccgattgatggttgggctgagcaatctgttgagccagccagcgaaccagaccatgctcactttctaactgcgattcttcttcctgcaataactcccccaaatgcaacacgtcagtcagccgccgctcaccaccagccgtagccagcagattttcagccaatcccctacgcgcaataagctcacgtagcatcggtaaaacaccacgtttttgccagtgttggcgatagcgatcaaactcctcaactaacgcatcccaagctttttcatcgtgattaagggcatctaacatctgcgcatccagccccagcaaactggtcgccatagcgctgcgtaatgccctttcttgctctggtgccaataccgcctgcaacaaccacaataaatccttggcttctggggtatcaaatacgctgtctcggttggacatatacaccgaaggaatagaaagcagacttaaggcatcacgtattaacgcagcttccgcgcggctacgcaccagaatagtgatatccgacgcttgtaccggacgcggcccatccggtgtctgtaaaatcgcctttccatgctgcccggcggttagccaatcacgaatctgcacggcacattggcgagacataagctgctgatattcactcacaccaacgccatcaccatgctgtaaccagaaatgcagtgcaggctgcgtaagaccctcaatctggaaatccaatacctggtttttctctgccgccgcaacttcaataaagggtatttgctcgaataaaaaaggcgctttaactcggctaaataagcggtttaccgaacgaaccatcggaaaagatgaacgccagttggtttccaacgtgtagtgagcattaacctcagagcgagcacgaatataggtaaagatatccgcaccacggaatgcatagatcgcctgtttgggatcgccgataagcaacagaccgcaatctttctggcggccatacagcgtattgaagatgcggtattgttgaggatcggtgtcctgaaattcatcaatcattgcaacgggataacgctgccggatagcgtcagacaacatttcaccgcccggctgctgtaaagcagcatccaaacggctgagaagatcgtcaaaaccgagctctgcccgctgccgtttctcctgctgaacactcattcgaatttcgctgatagctcgagccaaaatcaggtctcgcagcgttaagggttgttcaaacaaaacgtcaatcgcggtaaatagtggatgttcaggaaccgcaccttttttggttttttcaaacaaaactgtctggcgaaacttctctaattctttgggcaagagatagtctagggtttcctgctcggcccatagcccaactttctcaagccaattggggagatgtttactgctgtaactacgcttatcaacccctgattcgctaatcaaagcagccagttcatgggcgctttgacgccagaattcttttaactcatcgatcttcgtgatgacctgctgatgacggctgagaatcgtttcgtcatccccaggagtttgtcgcagcttaggcgcctccccctgtaaatatgcagataaatctttgagtaacgcttctggtccactccattcctgactcactaccgtggcaacagccaaaggcaatggataacagtgacgacgccaaaaatcggcacaggcctgccgccgcagcggtaattcatcctgaatcagtttttgttcgaacagaatcccggattcaaatgcgttattagccagcatcctctgacaaaaaccatgaatggtataaatcgcggcttcatccatttgccgctcggccgcgagtagatacgccgcagcagcgggtaaatccgtgatctctgccaataacgcccgatgcgcgggattactactctgccctcgcacacaggcgatacgtaattcatgaatattgttacggattctccccctcaactcctcggtcgctgcttcggtaaaggttaccaccaagattttctctacggtcagcgggcgtgggtaagcggagcttccccccaatccgagtaacaatcgtaaatagagcaatccgatagtaaaagttttacccgtaccggccgacgcttcaatcaggcgttcgccataaagcggtaaagtcagcggttcaaggcgttggggagaatttgtcatcatggcaccaatactttccgtggcagagtttgctgtaacgaggacacgttgggataagttttccaccctttaggcgcagcataactccccacatcctttccgttacctttaacctgagaaagcaacgcaagcccctgaggtttaatcactgcctgctggaaatagtcagctagctcggcgttattaattagccgaacctgagcgatcaatttatctcgagtatcaaaagcaaaattatttcgattaaagtcattactgaagcggctggcttcttcacccaacgtctgcgggcgttgcagcagttggttaatcagtccctgcttatactgctcgaaatctgctggtttcatatcccgcaaacgcttctcagcctgaggatagaaagcctgatagcgttgatagaggtacttaggttgcttgctattactttgcagcaagaaacctattccccattgacgccctaccgacatcgggaaggcaaagacggcatagcctaactgctcctcggtacgcaaccggtcgtagaaccacggttgaatgatttgccccaacaggttgctgtaagccatgcttttgatttcatcatagccagtaggaatatataccgcagccagagccgcatcagtgctactaccaattcgttgtaaattggccagctgcaccttatcaacgattacgtcttcgttggtccaccaatttgtgccaatgcaacccagctggtttttcagggcttcagctaactcgctaacctgtttaggtgccatattcccgatagccaggatttcaaccgcagactccttaagtaaactatcacggtaagcgatcacgtcctgcactgtgatcgtatcgaggagcttacttctttcactacgctcggtataaggcacgcgagaaagcatttttatcggctgaatcgccagttcaaatgcttttcctttatccgcaatagccagctgttcgcgataccaggatttagcctgcgccaactgctcttctgtcggagtgaagctggagtaccctacgactaaagaggtcaatagctgaggtaaacgctgagtaaaaccattggcattgacgtataaaccattgtccggcccggtcgagaagctaatgccaccgatagatgcctgatagctcaattgatcgagagaaagtgaagccagatagtctgtcagagcgaacaatacctgatgacgagcatcgtccagcgcatgttgattacggaatgcgagagagatatccgctttaggttcatcggcaaaatactggctaggcatatagaacacccgtaaacctggctgatcgacgattttctctggtcgggtcatttttttatcgacttcaaccaaagaaaaattatcaggaatataaggatttagcgtcggtaaagagagcgcgactttttgttctaaattttgccactctttcaactgctgcggcgtgattttgttcacctgataaggtgcatcaacaaagtaagccgttttgttatgtggttcatcagggctgatgtaccagattcgggcattttccggcgtcatttccgccaatcgtgctgcaatggctttaggatcaaaacgatcggccagataaggcgcatcaagcgtatgctcgaccggtactcgcagcatcatatccaccagccactcaatataatccatatcccgagtgatagatggataacggaaatccaggttcaatacatgtgcaatttcatcaaagtagcttttattaatgccttctttggccaacattttcagatattcaaaaatagccgcaacgactaaatctcgctgtgccagccctttatctgtcaaggatactgagattgaaaatactccaccgttgcgatcaaccataggatcggcccctgcgttgatcgagtcggcaagcccctgcttttgtagccaatcagataaggtgtttttgctacggttaccaatcagataactaatataagtatctgtcttgcttcgaaattcggcactattgttgtcgatgcgaaaatcaattttcagctgcttacgcggctgtgcgggaacatagtgaatgatgatgccggtttgctcagcggtaaccacaggtacggtgataggtggaaccttggcatcatgattaggaatacgaccaaacgtatctgccgctaactgagccagcttatccagaggctggttactataaattacgccaaccatcaggtttgcggaataataacgcttataaaaatctaacagttcatcgtgcaactttccgtcaggcttatctctcagcgtctccaaatttccaccggaaaaacgagcgctagggtgagccggattgagcgtttctgcgttaacttgcccaatgcgcataccgtcacgagaacgggccatagtcagttcggcattgaccgcgttacgctcacgatcggcattaatcggatccagcagaggctcggcaatagcatcggccaaacgttcgagcgcaggtgctaaggcgtcattttccacttccagataaaatgctgtgcgataagaagccgtgctggcattgtggctaccaccgtgttttttcaggaattccgaaagatttcccggttcagggaatcgcttcgaccccataagaaccatatgttcaaggtaatgagctaaccccaactgattatcaggatcttccagcgtgccaacaggcagcgccaaagcagccaaagacttaggcgcatcctggtcagaaaccaaaagtaccgtcataccgtcagccagttttattgcctgatatttgcgttgatcgtgttggcttttatgaatggtttccgctaatggttgccaacctgtcgaagcccagctaaccggcatccacaaccataataagaaaattacaccggcgatacgggtaagctgtttgtgcattcctttctcccatgaccctaaaaatatggcaccagaattttgtcgcgtttgttgagtaccaaacgtttggcacctagtttttccacaggctgatactcatcagcaaatctcaaaaaatgtaatatttaggacaataaaacaatcagttagcaaaaggtgaacagctaaataaaaagttcgaatactattgccatttactcttcaccgcccaattgttgttaaactcgattgtgctgcgcaacaggtaataagtaacgttccgtttcttgtaaaatcatcgccagacgagcgctgtccatgtggcggaaaactcgttgaatgtaaggatcttctccctctccagctatttgctgagatccctgccaagccaataaaagcttgttgcgggctttttcctgcgtgtcttcatcccacagaatttgtccagactccgcattaaaacactgactgagccaagcccagccacttttgctcaaaagcaataatggtcggctcattcctttttggtaaccctcgagtaatatctgcagattagcctgagcctcacaggcctccagaggcccaaaacgccatgcggttccttttcgaccatacattcggctttcgccctttccgcccgctgcacagtaaaccacgtgttcaacccaaagaagcaacccatccactgcggttagagccgctggccgccagcgaactaatccatcggcttgcacctgatgtatccagccggtgatagacatgttttccacagtgatatttaattcaaggctatatgtctcgcagcgctcctctctgacttgctcggcaagcaaggccatttcttcgagctgaccgcgccagtaaatctcgccaaatgccccgaaaggaagatcgccactcgctcgcgctctagcaaaaactttatcaacatctgactgctctactaatgcattcaataactgagtatttagttgataacggctgagattatccagcgtgaatggctcttcgtctggtaattccgtctcttcgatcacgaagttaacccccaaacgacgctggaaaaaggctcgaatcgggtgacgataaaagctggttaagtcatccagtagcagttcttgtactggctccggcgagagcggctgattaaaatcaggatgagccttcccctttgcgcctgcagcaggcaaccattccaccgcatagctttgcatttcactaccctgaataaagttctctatcgcgaagggtactcgcgcatgccagttttgtaagtgatcaataacctgttgtgcgctttcatccacgctaacagactcatcgccgggaagatggaaactctgaccgatatattcgatcaattcactcaccagtaccgacggatagcgcagactattatcctgaatcgaacgcccgatatagctgatatacagacgctgttgtgctgacagtagagcctcgaggaacagatagcggtcgtcgtcccgacggctgcgatctccacgctgaatttgtttagccatcaaatcaaagcccaacgggggcagagtgcgcgggtagacaccgtcgttcattcccaacaagcaaaccactttgaatgggattgagcgcatcggcatcaatgtgcagaagtttattggccctgccaggaaccgctgactgattctctcgttatccaaccgagaagccagttcttctcgcagtaaagtcaggggaacacattcaggatactgggcgctaatgccataaccgatcacttttaaccattgctgctcaatcagagcaagcaccgcttcagtttcattatcctgttcaaaaaaggtatcgagcagttggcgacatagcggcgaccattccgccagcgttcgcgcctcactcaattgctgcctccaacgactcagttgcatcagcatttcggctaattgcccaactatttctgccgccagaccactggcttcatcatatggcagaacatcatgccaatcgccggcctcactgctcatcgcgtaacccaataacatgcgagtcaatccaaagcgccaggtatgctgccccgtagccggtaacgataattcgcggacattatcatcatccagcccccaacgaatgccggattcaccgacccactggcgtaagcgtcgcagcccgtgttcatcaataccaaatttgttagctagggctggaacttccagtagcgccaatacctgctcggaggtaaaacggctttgaggcaggtccagcaaggtaatgaaagcctgcagcgcaggatgtgcctgactggctttccgatctgagatagcaaaaggcaggtaacgatcggcagaaacattaccaaaaaccgcctgaatataaggcgtatagctatctatatccgcaaccatcacaatgatatctcttggcgtcaaactgggatcttcctccagcatggccaagagttgatcctgtaagacctcgacttctctttgtgggctgtgacagatatgcaggcagatagaacgatcagacggatccaaaagacgttttttatcgctggaggctaacgtttctggggttgtaccaataacggcgtgatcttctagctccagcatatcgtgttgaatcgcgtgcagcagattatcaggctcaatatcgacaaaagcatgtacctcttgaatctcatcgacctgagataacaaatacatatggtcgcgccccaagcgtccccaagaagccaaaagagggttacttagctcttgctccccttcctcgttaaacagtagtgcagcattctccggctcacggaataggcttaactccagtttttcgcgataatgtcgacgtttacggctctgcaactttgccagaaaagcgtaattctggatatcgccccaaaaatagcggcaaggattggtgaacatcaggtgaatatcaatatgtttacctaaggcttgcaacgccgacaggtagattggtggtaatgcagaaataccacagataaagactcgtttaggcaaacccggagggcaaacgtcggtttcaagtaaggtgcgaataaaccgttgataaagattggcacgatgccattctggctgctgaagctgacgtgtatattcggttaaagctttccaaagcggagcctgccattcctgagcctcgtccagaccgtcgactctaagcccttgctcccaagcctccagccacttgggtcgatataccaaatattggtcaaacaggtcagcgacccgcgccgctagctgataaatttttcgtttatcgccatcgtcactcaggtagcgctgtagcgacgaaaagacgggttcgtttagtaaatcgggaagtagccacatcagtttccaagtcatggcatctttgctgaaggcgctttctttcggtatgccaggtaataccttagtaaacatatcccagatgaatgttgcgggcagcgggaactcgatattagccgcaatgctaaactgttgtgccaattgcatctgtagccattgcgccattccggggctttgcaccaaaataacttccggctcaaagggattatccaacggatctctttctatcaatgccgtagtcagcgttttgagtaaatctaattgattagaatgataaaccgtgaacatcgcgactcccaaatggcgcatataatctataggtcaatcgggtcattcctgatgaattccctctagtacccaatactctagcctgacatagcctaatgtaacaggttataaacctataagagattcataaccccttacttccccgataacagtaaagccgataaagctcgactcgctgtcgcagcggcgtaaggatctcaacgtttaacctctcgcacaagtcatcaacccgcgtaatcacactgttatgttgccagcctgtacgttgccagcctgtcttcggtggccacgtcattgactctgcaagttccctggtcataaaagactcggtttcatactgagctaaaagccacgcctgttttccatgccattcccgataaaaaccctgcaacaatatttggtgatattgcaatactccgagtaaggaaactgacaataacaaaaccgctatcatgacctcaggtaagctcaaaccctgctgactgttttgattgatgaaccgcctctccatggtcttatttttcctgctagaaattgctattagcctgagcaaaattccctctccttttccgggcaaaaatctagccaaccctgagcgataccaacaatatgatgtccctccggcgaaacttgcgcgttgtctggagcaactcgctgataaagatctattttgtgcccgtggcggttcccccccccttctccccttaatacgaagatatttggtgtaacactcgctttaatacaaaccctcaatgcttctgaaagatgctcctgacagtgccacaatcttttactctgccgggggggggctacctgatgcaaaggccatctctggcttattccccagctcagggcggaaatcgccaggttatagctacgcaggtaatgttgctcattacgactcatcagtagcagattatctaactgcctatgcatggcctgaagcaacaagaggctcagagcaaaaacgaaagtcatcgtcatcagtatggcgctaccgttctgcgaagattttctcataggttgtaacctcggactctacgctgcaactcttgccgtatctgcgttcgcttccctacctgcccagataagttaagggttaagagatttccccttaacggaatatattctcgttgtacgtcaaagccagtgacaaaaacttctgttgcatcaaataacctttcccacccactactttgacaatccgtttccccgcgagcactttccagctgatttttacgtagtcgatagccaaaatactcggaatgcttatgccttatcccctcccactgaccgtttcgattcaggtcgtaagccacaatgacgcaagaattggctttctctcctgaatactgccccagaaacaaccgcttcccttgacagaacccattgcagaacccggctcggcgcagatctttttcaatgattgagagaacccgttgcattgataattcaagccgataatgctgataaactgccgtcagccgctggcgtagttgcggataaatattcacactgcttaaaaccatcatgctgccaaatatcaaggcaaccatcacctccggcaggctgaatccgtcagggaaacaacaaccgaaacatcggcttcttttcgttcgaaggttagggtcagtgactaacatagtggtatccgaaactgagcatgtttctctccgcacaatctgattcgtccatgattcgaaataactaaccgaatacgacctgccgcattagccagaataattcgccccggttgcgcagtgttccttaggccataaaatccaaggctctcaggcgttaactcaaccaaagtaatacctgagtaatcgggcgtgaataaccatccatcctgcgcctgacacccttgtaatggctgctccccgctaccaatacaccaggtatcatcgaagctgtgccagagcaatgccggcctattcaaccaaaaagcgtcagcctgcaagcgagttaagaaacctagtaactgccgagcggttatctctagcctctcccgctgctgataatggctccaatgttgaaaactgctgactgagatgtaagcaagcagagccagcaccagtagccattcaatcaggctaaacccgcgttgtttcatacatacatgagttttcatccggcgagtttaaggaaatcaccaaatgaagccagaggtagaatgagaagtctggagaggctccgcaacctctttaacggtggtgtaatggcggctgtcaatctgcgtagcaacacgcatttctaaactgaaaatgaaaataagaaggtctggggagaaataaaaaaacggagccgtttggctccgctctgttctgagactcatttattaaacaagtcagttatagctgttgtattgacggttaaatagctattggagctttaatccccggatacggatcgtagccttcaatttcaaaatcttcaaagcgatagtcaaacagcgactcaggtttacgcttgatcaccagcttcggcaaagcacgcggctcccggctcagttgcaaatgagtttgttctatatgattgctgtacaggtgagtatccccgcccgtccagacaaaatcgccgacttccagctcgcactgttgcgccatcatatgcaccaacagcgcgtaactggcaatattaaacggcaaaccgaggaatacatcgcaagaacgctgatacagctggcacgaaagcttgccatcggccacgtagaactggaagaaagcatggcacggtgccagcgccatttgatccagctcgccaacgttccaggcagaaacaatgatacggcgtgagtccggatcttgttttagctgctccacaactttactcaattgatcgatttggcggccgtctgccgctccccacgcccgccattgcttaccgtataccgggcctaaatcaccgttttcgtccgcccattcatcccagatagaaacgttattatccttcaggtaaccaatgttggtatccccgttcaggaaccatagcagttcatgaataatggaacgcaaatggcaacgcttggtggtgaccagcgggaagccttcctgcaaattgaaacgcatctgatgcccgaaaaccgacagagtaccggttcccgtacggtcagcttttggggtgccctcatcaagcacttttttcatcaaatccagatactgtttcatgtcacctcacgaaagttgttgctgaggacggcggtacgcccaaatcatcataataataccggccacaatcattggcacagacaaaatctgccccatgctgattacaccgtcgaacaggccaagctgcgcatctggctggcggaaacattccaccacaatacggaagaagccataaccaatcaggaatagccccgacacgctgcccattgggcgcggtttgcggataaacagattcaggataataaataggactacaccttccagaatcatttcatatagctgagacggatggcgtggcaacactccatactggaacagaatgctttgtaactgaggatcggtcgctgccagcgcaatatcttcactacgtgaggttgggaacaacatcgcccacggagtatccgtggttactcgtccccagagttcgccgttaataaagttacctaagcgaccggcacctaaaccgaatggaatcagtggcgctataaaatcggaaacctggaagaaatggcgttttgtgcgatgggcaaaccacaacatgacgcagataacgccgaccagcccaccgtggaacgacatgccgccatcccagactttaaacaggtaaagcgggttatcaataaacatcggcaggttataaaacaggacatagcctaaacgtccgccgacgaacacgccgacaaaaccagcatacaataaattctctacttcatctctggtccagccgctgccaggcttgtttgcacggcgaaccgccaaccacatggcaaaaacgaagcccaccaaatacattaaaccgtaccaatggagagacaccggcccgatggagaaaatgatcggatcaatattaggaaacgccagatagctgttgctcatctatcaccacaatatgtctaggattttccccaaattgggggctgcagggagcgcatgatagcataggcaggcgacattcaggggaacggcaaagggaaaagttctgtaaacaatgacggcgaatattcccgccgccctctgactgctcagctattttccgcctcgaatcagcccgcctaaaccgcggcgttccataaatgcggcagttaaatgacgcacatcggtggtcatttgcgccgtcaatacacgctctgccaaagcttccgcttcggccagatcaacattacgcagcaggtatttaattcgcgccacgctgcgcccattcatactcaaatgacgatagcctagacctatcagcagtaaagcgcccataggatctccggccatttcaccgcataaactgacctgtaaaccggaatcggtcgcctgcaccagtatttgccgcagcacttgcagcatagccggatgcaaactgtcatacagcgaagcaactcgcgtattattccgatcaaccgccaacagatattgtgttaagtcattggtcccaaccgaaataaaatccacccgagatttcaggtacggcaacataaagatcatcgccggtacttcgatcatcacgccaaggcgcggctttggtaattcataccccagcgcttcttccacttcccgtccggctcgatcgatcaagcgcttcgcttcatccacctcttccagactggtgatcattggcagcaaaatccccagattgccggtaccggcattggcccgtagcatcgcccgtacctgaatcagaaagatctccggctgatccagcgtgatccttatccctcgccagcccagacacggattttcctcgcttatcggcatataaggcagctgtttgtcagcaccgatatccagcgttctaagtgtgaccggtttttgcggataaagctgtaacatgccctgatactgggccacctgctcttcttcggaaggaaagccgctctggagcataaaaggaatttcggtacgatacaggccgacgccatcgacgcgcccgccgagcagttgctcatgttccggacttaaacccgcattgagcagcacctgaatacgttcgccacttttcagctcagcgggttgctcaacatcgtcttcggccagcttgctcagctcgatttcttcgttaaccagacgctggtattcctgcaccagcaccggctctggatccaccagaatctcgccgcgatagccatcaacaatcaataatctttggcttaatagggaaggctgaatatccgcacccattacggtaggaatacccatggcgcgcaccagaatcgccgcgtgcgaatttgctgcaccatcgcgcaccactacgcccaccagacgatcctgaggaacttcagccaacaaagtggcggttaattcatcagcgaccagaataaaacgctcaggccactggctcgcgccggaggtgctgtcatcgagatggaagagtaaacgctgccccagagcacgcagatcgccggctctttcacgcatataagtgtcttgcaggctggcaaactgagcagcaaactgctccacaacttgcttgaccgcccattccgcaacggaaccggcgtcaatttcagcaaacaactcccgcttcaggcgagcgtcgtttaataagtgggagtaaaggtcaaaaatagccgcactttctttctgggaactagcggcaaaacgcttactgaaacgacgaaactcggccgccgcttcttccaatgcctgagttaagcgttcacgctcacgcgcgctatccaaggttgaggctttgtaaacctgatccagtgaaggctgggtagtgtcctgccaaccttctgcaaccgccacgcccggtgcggcagccagtgcccgaatgcgagtttgacgatattgaccaaaaatagcgttgagctgagattgagacagaatggccgccaactgtgtggccagcgtgaccataaatgattcttcgctttcatcgaattgacgatgttctcgctgctgcaccaccagcacgccgagcaattgccgacgataaataatgggaacaccgagaaaagcgcggaagctatcttctttaacctgcgggacatacttaaaactggggtgactttgcgcatcagccaggttgatcggttcggccagtcgcccgaccaatcccaccacaccttcatcaaaagccagcgtaatagtgcgaccccgaggctttttcaaacctcgggtcgccattaggtaataacaacgacggtcattatctgccagataaatcgagcaaacttccgtgttcatcgccagacaggtttcattgaccaacagctctaacgcatccgtcaggctggctgccatcgcaactttctctacgacttctcgtaaacgcgtgagcatgattggataacttaacctcttttccggcgataagcgggtggtgtccgcggcggagtcacctcctgcatcggcatcactgtagcagcaaattccttcatcacgcggcggtagacatcccgtttgaatgacaccacctgacgaaccggataccagtagcttacccagcgccaaccatcaaattctggcgtgctgctgcgctgcatattgatatcggcatcgttacacattaactgcagtaaaaaccatctctgcttttggccgatgcaaaccggctttgtatcccaacgcaccaaacgtttcggtaatttataacgcagccagttacgggttgaagccagtattcggacgtcctttttattcagtccaacttcttcaaacagttcgcggtacatcgcctgttccggcgtttcgccagggttgattcctccttgaggaaactgccaagagtgctgaccgtaacgtctggcccacaacacctgcccctgcctattacaaattacaatacccacgttcgggcggtagccatcatcatcgatcaccggactacctcgataagcttaatactcaaagatgctctgattgtttcacactaccaacaggcggtaaaccactgcttatcagtgattgaaacaccatgaccttgggataactcacagatattggcaaagttataaacaccctcggccaggctcggctaattttattcactttttctgtggatatatgtgtgcagaactcaggggtaagacgggtacaactcattttaagtaaattatagacgaataacaaaaaacaaattaaatcatatttttcatcaaattaagttatgcacagggtataagtaaagtgcaaaaatgtgatctgtatccgtttatgatccttggctgattaaagatccaccaatgcggtttttatccacagataatgcggctaagttacacaaaaaatggctaaactcgcaaaaaaaccctgcgtcaaggctgtaaattgaaccagtattcatgtttcaaccaggttatcccacaaatctgtggataaataggtgtaagatcctgttcattgttgctggcagctagtgtacaaatcgatgaaaacaaaatcacagcccggtttaagtgctaaaaaatcactgttaaatcatgctattattaattttcattcacagcgataattaaagttcgctgcggtgtattaaagcagtgcattttttaacccatcctgatgagttttttcactatgtcggtttattcacaacccccagcaccaccggtagacgaacaacagctcgtggatcgcgctcaggcgctggcaggcttcacgctaggagagcttgccgcccgggctaactggcctattcctgcgaatctaaagcgtgataaggggtgggttggtatgctattggagttttatttaggtgccagcgctggcagtaagcccgaacaggattttgcagatattggcatcgagctaaaaacgatcccaatcagtgcgcaaggtaaaccgttagaaacgacatttgtgtgcgtcgcgcccttaaccggaaatagcggcgtaacctgggaaagtagccatgttcgtcataaactggcgcgagttttatggattccggttgaaggtgaacgacaaattccactcgccgaacgtcacatcggcgcgccactgttgtggagcccaaacgcagaagaagaagagctgctgcgccgcgattgggaagaattaatggatctgattgtgttaggtaaggtggaaagtatcactgcccgccacggtgaagtattgcaattgcgtcccaaagcggcgaatagccgagccttaaccgaagctatcggcgaaaaaggccagccaattctgacgttgccgcgcgggttttacctaaagaaaaccttcaccgcgcccttgctggctcggcatttcctgctttagagattgttctgagccgtactgaggttatgatccattaataacagcgtataattacattcttgtattttttaaggtgtgtaaacgcaatgtttgaatggattgccgatccaaatgcctggctggcactgggcacgttgacgattctggaaattgttctgggtattgacaatattattttcctttctctagtcgtagcaaaattacctaaagcccaacaaaacaaagctcgtcgcattgggctggccggtgccatgctaatgcgtttggcattactggcctctatcgcctgggttattcgcctgactaatccattatttacggtgatggaacatggggtttccgcgcgggatctgattttgttactcggtggactcttcctgatttggaaagccagtaaagaaatccacgaaacggtagaaggcagcaataacgatcatcagagcaatgtcagcacgttctttggtgccatcgtacaaatcatgctgttggatattatcttcagcctggattctgttattaccgctgtgggactttccgatcatctctttattatgatggcggcggtggttatttccgtgggcgtgatgatgtttgccgccagacctattggcgaatttgttaaccgtcatccttccgtcaaaatgctggcactggcattcctgattttagtggggttcaccctgatgctggaaagcgttcaaatccacattccgaaaggctacatttacttcgccatgttcttctctatgggcgttgaaacgctgaacctgctgcgcagcaaaaagaataaaaccaataatatttaaacctaatttctgcgggtgcaaccttatgcgcccgcatcactcttttttgctcacattcatctcatgcccttcccccgtatctacggcttcgatatagtcggataaggccgttttattttcgcctggtaatttcggacattaaggaaggtcggcaatgcaatatcaccgtatcccccacagttctttagaagtaagcctgctgggtctgggcaccatgacctttggtgagcaaaacagcgaagccgatgcccacgctcaactggattacgccatctcggcaggtgttaacctaatcgataccgccgagatgtacccagtaccgcccaaacctgaaactcagggactgaccgagcaatatataggtagctggcttaaagcccgcggttgtcgcgaaaaagtgatcctggcaagcaaggtttctggcccgtcacgtggaaacgatcaacccattcgccctgcgatggcattggatcgcaaaaatatccgcattgcgctagatgccagccttaaacgcctcaataccgattatctcgatctctatcaattacattggccacagcgggaaaccaactgctttggcaaactgaattaccgctacgcgcaggaaaccgccacggtcacactgctagaaacgctggaggcactggcagaacaagtccgcgcaggtaaaatccgctatatcggcgtgtctaatgaaaccccttggggtgtgatgcgctatctgcaattagcagaaaagcacgacctgccgcgaatcgtttctatccaaaacccttacagtttgttaaatcgcagctttgaggtaggtctggctgaaatcagtcagcacgaaggtgtagagttactggcttactccagcctggcattcggcacgcttagcggtaagtatctgaacggcgccaaaccacctcaggcacgtaatacgctatttagccgctttactcgctactcttcgccgcaggcacagttagccatagccgaatacgtggcgctggctaaaaaacacggactggacccagctcaaatggcgttggcttttgttcgtcaacaaccgtttgtcgccagcacgctgcttggtgcaaccacgttgccacagttgaaaagcaatctggatagcctgcatctgattctggatgaagaagttttgcaaggtctggaagaaattcacactcgttatactttccccgcaccttaactgtagcagtggtcgctaaatgcaaaaaggccgtcacattggacggccttttctatataaaattatataattatatcagcgtcgtttttgccaccactgccatacccacagtgacgctatagccaaagcgaagatgacaccgaacccaatgcctacggccaccaccggtgcacccagtttgattaccagagaatacagcgccagcatcaataacatcgcggtattttcacctaaattctgtaccgcaatggcattgcctgcgcccacgctgtgttttccacgctcttgcagcaatgcattaagaggaaccacaaagaagccgccgagaatcccgatcgtcaccagtaataaataagccatcggcatactctgttgcaaagagaatgccgctaccgcaacgccgatcaaaaccccggcaggcatacagcgtctgaccgttttcagtgtaacaaagcgcgctgccgccgctgcgccgatcacaatccccaccgctaccgttgcgttaaggatcgtcggcgtcgcgttatcaatgatccccaatgccaccggaacccaaagtaccagtagaaaacgcaaagtgactcccgccccccaaaaaaggctggttccgaccagcgagaaacgcgtttccccatctcgccacagcgtcttacaagcggcaaaaaagcgacgactcatcactgtcggacgccaagattgtccacgacgggcggcggaaagacgaggaataaacaggttagcgaccaccgcagcggcgtaaaccagcgcacacacgcctaaagcgatactcagattccagtccgctaacattcctccagccaccgagccaatcaaaattgcggcaatggttgaagcctccattaaaccgttggctttcaccaattgatcgccggaagtaatttctcccaggataccgtatttagctggtgaataagccgcagcaccaatcccaaccaagctataaccgaagaacggattcaagccaaaacagatggctaacgcccccgctaatttcagagcattagcggtcatcatgactcgtcctttggcaaaactatcggcgaactgaccgacaaagggtgccaaaatgatataagtcgcgacaaaggccatttgtaaaatcggctggctccaatcgggataaagctgctgcttaatcactgccaacgtaacgaataacagcgcgttatcaccaaaggccgaaaaaaactgcgccgccaaaacggccatcattccgcgagataataatggcttatcatctgttgccccgtgctgggtcatgcttccatctccgggtgctccgccattttagccagagtgacaaaatcgggtttaccgctgcctagtaacggcaaagctttcaacgggcgaatatcgcgcggaacggctaactctggaacgccactttcccgcgccgcggcggataaacgttcacgcgtcatattgctatccgttgtgaacaacaccaatgcctctcctttcccactatcggattttgccgcagccgcgtgttgataatcaggagaaacccgcagtgccagctgttcaacgctttccagagacaccatttcccctgctagcttagcaaaacgtttcattcggccacgaatagtgcaaaatcctttttcatctattgagacgatatcaccggtgtcataccaaccgttctgtagctctccatcagcattttccgctaccggtggctccagcacatcaggtttttcaacgcgcagataacctttcataatatttgggccgcgcaattgcaagcggccaccctgttcaattccaggaactttgatcaatcgagcttccatcgtcggcaaaattcgcccaaccgtaccgactttagccgccattggcacattaatcgccaccaccggcgcgcattccgttacgccgtagccttcaaggatgcgaataccgaatttatcctgccaaatctgtttggttccttccgccaatttctctgcgccagcaaccacatagcgcaagcgggcgaaatcataaggatgagcaaaacgagcgtaattaccaagaaaagtcgaagtaccaaacaacacggtacagtttcgatcatagaccagttctggcacgacccgataatgcagcgggctaggatagagaaatacccgactaccagtcattaatggcgtgaataatccaaccgttagaccaaaagcgtggaacaacggcaatgacgacataaagcgatctcgaggcgtaaaatcagcaatagtgcgaatttgctcgacgttggcaagtaaacttccgtgagaatgcacaacacctttgggatggccttccgaacctgaagtgaacagaatcagcgctgcatcttccgctttctgagccaccatagcgcgacgagggagaaagagatggaatagaatccagagtttatccgtcagactaaccgtatcctttaaatcctccagatagacccaatgggcctcgctcacctgttcaggtaaatgagttagcttccctttctcaaggaactggcgcgacgtcacaatggttttcaggctggccgcagtcatggcacttttcagccctttagcgccggaagtgtaattaagtaaagccggaatacgcccactcagtgaagcaccgaaaatagccgcggcggtaatagttgcgttaggcaaaagcataccgactcgctcacccgattcggtaaaacgttgtaatatccggctcactcccaaggatttctttaataacgtctgataactatcttctttaaaagcgatatcttcgatacacggcttatggcgaccataacgatctctggcagacagcaaagcttcgaacagcgtttcacgtgggattatagccatacgtgccgccatcataatctcatgaagcttttctcctgccagtattcggcgttctttggctctgggtgcctcaggcatcggtaattgggttgctggcaggacgtaaatactgattttggggaaccattgaagctttaatatcccccccaggcggccaaagtgactcaactcaggcccctctaaacgcacgggaataactgtcgcacctgatttcgccgcaataaaggccgcaccatcataaatcttcatcaatgaaccggtcacggtaatccggccttctgggaaaatgacgacgggttttccctgctcgaccattcttactaactgcttgatcgacataggttttgctggatctagtggtacgaaatctacgtaagactttagccaacgcatataccaactttccgtcacgctggaatacacggcaaacacaggttttatcggtaagaacaacgccaataatattccatcgagaaatgaaacatgattgggagtaatcagaattttttgatgggagaactgatcgccgataccttcaatggtgacgcgaaacagtcgacgaaaaagggcgcgcagtaagcggagaatcatatccatttctctatcagtcgatgagtcagataaatgcagaatactataatcacagcatttattccgctaaccaacgtaagagaatctgcatggaaaaaagaataaaaaaaaaacctacgtatctacgtaggtcggtgtaaataaaaaactggctctaacacacagcgtatgttgattactcaccaattaatacctctgggatatcaactgtaccgacttaacccaaagctcagccagcaaataatcgcaatatttacgcgcaaagtgtaaccagcaatgaactttgtcagaaacaagatatatgctgttaattcatgtaactacggccatatttaaggctgaagttaccggcttctcatcaactgtatccctgccaattgcgccattattataacgctctgacctccaccaaacagctcattgcatttgggccctgcgttagtggtgacgttcctatatccaaagttaatacattcgggtttccagactgctctatctgatgccgctgttggccaaaaccgggatcaaaccaggctccagtcgccatcaaaacgacgcctctcgtcacaccgtccgtaatgctcacaccggccagacaactgccgcgagcgttgctaaccagcacttccataccttcggtaatagttcgtgtagcggcatcatctggatgcataaataaggtttcgtgtccggcagttttgtttgattgcgccagcggcgcgggatcaagctggctgtgtagccgatccgctggctggattgagatcaaatgcaatggccatttttcagcatcgacactgcccaaccactctaccggcggtttccattcagcgtgaggaccaaaatcttcatattgatagcccgcaattttctcactgaacaattctattttaccgctgggtgtctgtaagggatgcgcctgaggattcgaacggaactcatcgaagaaaacgaactctttctgcggggcaggcaagccaacatagccctgccgccagaaatcctcaaagtccggccattccacgccttcggcacgctgcgctacaccgcactgttgatagatatgcgcgatccacgccatttcatcccgattttcagtgaaagcttcccgataacctaaacgttcggctaaatcagcaaaaacatcaaaatcgtttcgcgcctgatgctgcggagctatcgcctgatgcatggctaaaacataacgatcgcgcgaggaaccaccaatatcattgcgttccagagagctggtgatgggtagcacgatatccgccattttagccgctggcgtccaccagatatcctgcacaataacggtatctggcttttgccaccctttcactagccgattcagttgctgatgatgatggaaagggtttcctcccgcccagtgcactaagtgtatatcggggtaggtatgggtttccccttgaaatgagtaactctgccccggttgaagcagcatatcgcaaattctggcaaccggaattgccagcccggacggatttttacccaccgacatagtcggtgccggtgtatctatacgcgggttcccaacgccattcattgagccgtgcccgaaagaaaatccgccgccgggtaagccgatttgccccaacatcgccgatagcgcaatcatcatccagtaaggttgctcacctcgatgagcgcgctggatggaataagaacaagtgataaaactacgtacaccaatcaattgcagtgcaagttttgcaatgcgatcggcaggaataccagtaatctggctggcccactccggagttttggctacaccgtcatgagtgccgcgaatatactccgccaactgctggtagccaacgcagtgactaagaaggaaagccttgtcttcagcaccacggcgctgaatttcataggccagccccagcatcagcgcgacatcagtattcggacgaatgggtatccattccgcatttacgaattccgggcaatcatcacgcatagggctgatattcacgaccggagtgccttttctcaccagtttttccagccagggcttgagagagtgctccgcagcaccaccggatgatacctgcgcattttttaacgctaaaccgccaaaagcgataaaaatctcgcagtgttccaccacacttggccaggaagtcactcgtccagtcagtgggctaaacgttccaatgacgtagggcaggaaaaactgagccgcaccccaactgtaattacccatttggtcaacgccgccaccgccgctaaagtaaaaacgccgaactagcgaacgagcgtggtgtactcgccctgcggaagaccagccataagaaccggtaaataggccagacgggccatattgctctctgactcggcggttttcttccgcaaccagatccagcgcaacatcccaatctacctcaacgaaatcttcccgcccgcgtaaggtacgatcgcttccctctcgtttctgcaaccatgaacggcgtaccgccggttttcggatgcgtttatcggaataaaccataggtacgatagagtttaatagcggcgaaggatcgggatcttctacaaaaggttcacaacgaatgagttttccgtcttcaaccacggcggtataagcgccccaatgagcaagctgcgggtaacgagtaatggtcatggcgctctcatatagatcagtaaaatagataaacctgcagatgaaaataccttcgccagctagctagttcaacgaactaattaagctaaacaagttctattttgcctaaccttccggtactcaccttaagtcgcaatagaaaatgctctcttttccgttttatttggttttatctggccaagttgcgatctctcccccttgcgagaagcatttttttccgcaaaactgaaggatgtaagcgattaccctaaaagtttatggaaaagaaatggccactattaaggatgttgccaaactggcaggcgtgtctgttgctacagtttcacgcgtaatcaaccaatcccccaaagccagtgaaagttcccgcgcggcggttttaagcgcaatggaacagctacagtatcacccaaatgccaatgccagagctcttgcacaacaatcaacagaaaccgttggcctcatcgtttccgatgtttcggaccccttttttggtgcaatggtcaaggctgttgagcaaattgcctatgccacagggaatttcctgctaattggtaacggttaccataatgccgataaagaacggcaagccattgagcagttgattcgccatcgctgtgccgcattagtagtacatgcgaaaaagctgcccgatgaagagcttgtttcattgatgaaacaaattcccggaatggttttaatcaatcggacactggcaggatatgaaacacgctgtgtcgctcttgacgatcgttacggtgcctggctggcaacccgtcaccttattcagcaaggtcataaacgcattggaattatctgttcaaaccaccagatttcagacgctattgaccgtcttcagggctatctggatgcgctaaacgagcatgatattcccgtggatgaaaaactgatcgcttatggcacaccagatgaactgggcggcgagcaggcaatgaccgagttattaggtcgcggcaagcaaatcactgcaataacctgctacaacgattcaatggccgctggtgctttatcagtacttagcgataacagcattgatgtaccacaggaaatctctcttattggttttgatgatgttctgatctctcgttatttacgccctcgccttaccactattcgctacccggtagttgcgatggcaactcaggcagcagagctggctttggctctggctaaccagaccccactccctgaaatcaccaacatgttcagcccaacgctggttcgtcggcactcggtgaccaatccgccaaatcgtacagaacatacggagtaacctgcacttatccctattatgttaaactgcgcgccctggatatcagactggctaagaggttagtgcttaatgattactatgctagatgtctctatacgtgctggcgtttcaaaagcgacggtttctcgcgtattaaacggcactgggcaagtgaaagaaagcacccgggctgcggttttcaaagcaatggacgaacttggctatcgccctaactttttagcccaatctttagcgaatagaagctcaaacagcattggcctggtggtttccaattttaacggcccttactttggtcgcctgctacatcaagcagccacgctcaccgaagccagcggcaaacacctgatcgtaactgatggccacgatacaccagaaggagagcgtcaagccgtccggctgttggcagacaggcgctgtgacgccatcattctctatacgcgttttatggctgaggctgacctgatggcgttacttaccagcctacccactccgcttatggtggttaatcgcgatttacctcaagcgcgtgagaggtgtgtattctttgagcagcaacaggccgcttttaacgccgttagttatctgatccagcagggtcacagagatattgcctgtatcactggccctattaatacgccgactgcgctatcccgtctgtctggttatcgtcaggcactggccgttcatgatattccttgtaatgattcgctggttgttcagggcgacagcaacgtggccagcggctattccgcctgtcatgaattactgcatcataatcggcatttcaccgctctttttgccagcaatgacgatatggcaataggtgctatgaaagcacttaatcaagctggaaagaaaatgccccaagatgtatcgctattcggttttgacgatgaacccagcgcagcctatctgcagccggcgctgtccaccgtatacctgcctattgacgcgatgatcgaggctgcgataactcaagctttaaaattaatcgatggcaaaagcgttaatcccttatcacctttcatcggcgagttaaaaattcgcgaatctgtctctcccggcccctataaaccctaagttactgttagacaaaaccgctcgccataccttattcgccaagatgcgaggcgtttcgcattctttatcctgacatttcccttgggataaaaaatgcttcattctgctttaaaacttggccaacctcatatttcacaggacgagaatggaggtattaatgtttaaaatcattggattgagaaatacaaagcggctaactcacattcgtgacggagaatacctgagcaatttaaggctctatcatcaacagcgcgggtattcaaaaatatcagggcagaatcatgcagggaaagggagtgggggtttgcaacgcaaggctcagaccgccaacggcagcctaagcatcagtcttcgccaatctttaaagcatttccaaggcaaccagttcttcgatagtttggcggcggcgaatcaatctcggtttcccattttcaaacaaaacttctggcagcaatgggcgactgttgtaattggaagacatcgacgcaccatatgccccggtatcatggaacaccaaataatcacctattacagcccgggccaaagctctggtttccagcccaccgccagcttgctgagtaaatacgtcaccagattcacacaatggtccggcaatcaccgaatcaatcaaaggctcattggtaatatctctgccatcggcaggtaataacgaaatatggtgataactaccgtacatggcgggtcgcatcagatcgttaaaaccagcatcgactaatacataatgacggctacccatattttttaccgccctaacctgtgcaaccagaacgcctgattcagcaacaagaaaacggccaggctcaatctcaaggctaattgggtggcctaaatgttcagcgatttgctgtctggctttattccataggccgtaataatgttcggtatcgataatatcctccccatattggtagggaatggataagcccccgccggcagatatcgcgctgatatcctgatccaattcgattacctgacgtaccatagcagcacagacttgttccaaatgttgataatcaacaccagaaccaatatgcatatgaatgccaaccagctttaacgagtatttttggatttcggctatcgccgcaggcagatcttgatgccagataccgtgtttgctgttctctccaccggtattagttttctgactgtgcccgtggccaaatccggggtttacccggagccatacgggatgccccggtgcatgctcaccaagctgagttagcatatcaattgatccagcgttaaccggtatatctaactcgacaacacgcagcagagtcgtctgatccaataaatcagcggtaaatacaatctctgcaggctcttggcccggctgaaaaccggctaacaaagctctttcaatttcccctaatgaaacggagtcgaccttaacaccctgctcacgcattaaacgtagaatatgaatattcgaacacgctttctgcgcaaagcgtatcacatcaaaattacgcaactgattgatacgttgtgcaataatatctccgtcataagcccaaaccgggcatccgaagcgcgcaggtaatgccagcaggttttcggcattcagggcggaggaagtatcagtcagagagagcggcatagggtttccttttgggtaaatctattctgattaatttattggctaactcattattagtcattcactttggcattcaaaatatctatttacgcacagtctattcatttatgatatagcatgaatgcgttgaaacagatcaaatcgccggtgcacaggagcgaataatgcccgctatttcattacgacaaatagagatttttcatggtgttatgacaactggcaatttgacggaggccgcagctctcttacaaacctcacagccaacggtaagccgcgaactggctcgttttgaacagttaattcaacttaagctttttgatcgtgtacgcggtcggctctacccaacggcgcaaggattaagacttttcgaagaggtacagcgctcttattacggtttagaccgcattgtgcaagccgcggacagtattcgccagttccaacaggcgcagctctcaattgcctgtttacccgttttttcacaatcactactaccggcggtgtgtaagccttttatcgatcgttacccggaagtgagcttgaatgtaataccgcaggaatcgccgttgttggaagaatggttatcggctcaacatcatgatttaggtctgaccgaaaatacacaaacgcctgcgggaacccaacgatatacattaatgacgctcaatgaggtttgcgttttgcctgcggaccatccattgcaaagcaaaaaggtgttaacaccgcaggatttcaacggtgagaattttatcagcctgtcggtaaccgatagctaccgacaattgctggataatttgtttaatgaagaaggaattagtcgccgtttagtgatggaaacccacagcgcagcatcagtttgttcaatggtacgagaaggcgtcggcgtgtctatcgtgaatccgcttaccgcactcgattatgcggcaagccatcatgggcaaggcgtttgcgtgcgcccctttagcgtcgaggttcctttcacggttagtctagttcggccattgcaccgcccctcttccgaattagtcgacacttttattgctcatctaaaacagcaggtaacacgctttaagacacgtctgaccaacgtcattacccgctaacttggttaacaccagcgagtcgcgaacgccggaaagtataaaggcacaagaacagcccaagcagtgcaagcaatgcagcagctaaaggcactgcatttaatcctaagccttgtgcaataaccacaccgccgacccaggcacctaatgcgttacccacgttaaaagcagcaatattcagagtagaaaccagattaggtgcttttttcccataagcgacaacgttgatttgtaacgctggcacggcagaaaatgccgccgcagaccataagaacaaagtcagttctgctgctagcaatgaataactgctccagctaaataaggcagagaatacggcaatcagcaaaaaggtcatggtcaaactcactgacaagcgccagtctgctaaacgaccaccaacgatattcccaagagttaaacctaatcccatcagtaatagcgtccaactgacgccagaggcggaaaccttggttacctcagtcaataacggtgcgatataagtgaacagagcaaacatagaggcggcgaataacactgtcatcatcagtgaaagccaaattcccgccccgcgcaacgcagcgatttctttgcataaatccgtaggtatttcatctttagaatcagggagtttggcatatagggcgaacaatgataacagcccaatcgcggccacaacccagaaagtcgattgccagccaaatgcctgccccaacgctgttcccagcggtacgcccaacacattagccagcgttagtccggtgaacattaatgctaccgcggaagcccggcgattaggcggcaccaaattggccgctacgacggcaccaataccgaagaaagcaccgtgacataacgcagtaataatgcgagccagcatcaaaaaatcgtagctgaacgctaaagcgcacataacgttgccaattataaaaataaccattagcaacaatagcgtctttttacgcggcaattttgccgttagtaccgccataataggcgcgccaatggctacgcccagagcataaccactaattaaccacccagctgttggtatagaaatatgtaaatcaccggccacctccggtaataaccccataataacaaactcggtcgtacctatagcaaaagcacttaacgccagtgccagtagcgaaacaggcatacaaaaactcccagtcaaaaatatccctcagccgttacgcggacggattaacaatgtaaagatcttatgctcggcctaaaaaaccgacgggttattgagtcgaaaagaatgacagaataagtgggagcgagtgtaggctcatcaatataaccttataaatttcaagtatttattttctcatcctgcgaaacagaagtaacatgaatgcaaatagaaaaaccagagttaagcgaaatcaatcaggtttgaaaaagagatcctaggttaactatatgaagatagtaataacgctttcctctgaacctgaatataaatatgttcgagaaggttactaactcgattcatttcatcatgccttgccattgttcactggtcgcaaaccactcaattaagaagtccagcagagttcttagcgttgtaggcatctgtcgccgcgaagtataaataccataaatgcccatcgcctgaggttggtaatctggcaatagctggactaaatcaccagcgataatatgtggcatagccgaataactgggctgaagagtaattcctacgccttccaaagctccgctgagcaggacaaccgactcattagcgctcaggttgccgctaaccggtaccgaagatttaatcccctcctgatcgaaatgccacaaacttttgccaaaataagaataggtcagacaattgtgcagagccaaatcctggggagtctggggaattcccttatttttcagataggaaggagcagcacagactacggaataacaggtagaaagcggacgagcaattaaattaggatctaattcattggtgatgcggatggccagatctattcgttcctcaaccaaattgatagcgcggttattcatctgtaaatcaatagcaacctgagggtaacgctgcaaaaatgccgcgacagcaatgcctagcgcagtttgagctaaggattgggaacaactgatcctgagtaatccacgcaatacatcgctttcgcccccatcaaccagatccatttcattagccaaagccagcattttccggcaacgctccagagtggtttctcccgcgtgagttaaactaagtttacgcgttgtccgatgcaataatctggcaccagcccattgctccatctgcgccagatagcgtgtcaccatcgctcgggacatctctagcgcttctgcggcagcaatcatactgccccgatcgacgatggctacaaatacttcagcggccgttactctatccataattagtcctatttaagcaacaaacaattgctcattatccggtttttattgcgtgatatgcaatttattattattcccgtacccagcagctaacagccaataggatgactaatatgtttactaaaacccttttacagatgacttttgccagcattgcaactttcggggctatttccaccgccgttgcagcggaaccgctgaaaatggaagtgtataaccctggcgagaaaagtattttccctgtttcttctgaaattatcagtggaaaaactgaggttgtattgattgatgctcagttccaacgtaatgatgcagaagcactgattaagaaaatcaaagatagtggcaaaaagttgaccaccatttatatcagccaatctgatcctgatttctacttcggccttgatgtcatcaccaaagctttccctcaagcaaaagtgatcgcaacaccgcaaactatcgaagaaattaaagaaacaaaagacggtaaaattgcgtattggagcgggattctgaaagataatgcaccaaaaactgtcattgtacctcaaccgttagtaggcaatagcttcaccgttgacggtgaaaaaattagcgtagaaggtttagatggcccatcgccagagcgtactttcgtatggattccagcactgaaagccgttgtgggtggcgtggcggtttccggggatattcacctgtgggccgccgataatcaaactgtggaatctcgcgataattggttaaaaacactggatgcgattaaggcattaaaacccgttaccgtagtacctggtcatttcctgggtgatgcgccgcaaacattggaatcagtgaatttcacacaaaaatacctgacaacgctaaatgctgaaattccgaaagcaaaagattcagcggaattgatttcggcgatgaaaaaacattatccaaatcttaaagatgaatctagcttggaattaagtgcgaaggtgctgaaaggtgaaatgaaatggccacaataattgccatctatcagagctgcagcatttaaagcattcacgaggaaataaatatgtccggtaccacattacactacattttcgatccactgtgcggatggtgctacggcgccgccccactggtaaaagcggcgcaggccataccagggctttccatcagtttccacggaggtggaatgatgactggagaaaaccgccgtcagataaatgcagagtggcgtagttatgttatgcctcacgaccagcgcatttcaggactgaccggacagccatttggcgatcgctatttcgatgggttgctgaaagatacttcagccatactagattcggctccaccaattaccgctattcttacggcagaaataatcgcagaacgcggtttagatatgttgcaccgtattcagcacgcacattattttgaaggtcgtcggatcgcagatacgccagtgttgatcgagttagctacagaactaggtttagatgtacagtcatttagcccagtatttcaggaaaccttaagcacggcgacggctcagcatattgctaatagcagagcttttttggctaaggtacatggccaaggtttcccgacctttattctacaaaatgaaaagggcgaaatgcagattattaatgctggacaatatcttggagatccagcgggatggactcagatgttaaatgaagctataccttagagatattacgagtctggttgattcatttattttgacaatcaaccagacaacttatttttgcgcaactttaagaatatagaataattttttggtaaaacgcatatcactttttacccgccccataacccactgtttaaatcgccacttatatacgaaaaaaaaatcatacaatctataaatataaaagaaagattcaggtttttttgcagttaatattattgactcgttccaatagtcttgccgttcccaaaggatgaccttgggattgctccataataaccgtattacaatccaacaagaaaaatagaggataacttattacataaggcgctttgagtaaattatttagctcttcatcattgctctcttcaggaaccatagagactacttttccattaaagatattcatcttgatatctaaaactctaaacaacatttcccgattaactttaaagcttgcatgatcatcataaatatcagcagaggtagtaatctcacgacccaaaatggtaactctggcattaagatggtactggtctaatggtgttttaattaactggtttacttcccaatacccctctatttctctcatgggattgaagtaggcatacagaaaaccaaagctactaccaataatcccacccaaaaatgcagatagaacacaaaaaccaattattttcttgtacataaaaactcaccgtccactcgcccacaaacgttatagcttccgtcactattttttttcaacataaggttaggatgcttacgataaagctttaaaaaatccgcgtctttcttttcatccagattaataagtataggcaaatcctgatactttactttgaagatgttaatctggtattcattaaagaagaaaacaaatgaaaaataaaaagccgcgctaaaagaaagtacaacaagcaataactgtgttaactggaaaggctttcttacattacgagaaattaattgagcgtcgtcattaattacctctagcactgtaggagttaattcattttcatcagcgttataaaatacccgtttaggctccaaacctaaacaatatcctttttttggtatagtaataattaattcatgttttttatcatttagcgcattgcgcaggttactgatagtttgcgtcaaggtattgtccgtaacatagctatcagtccagattgtcttttctatttgctcacgagagacagggtctggataattatcacacaatagagcaagaacttcggactctttatttctaagttttacctcattcccatcgtgttcaaccgctctaatcttaggggtaaaagtgatatctccaataaaaatcctatccattagtcctccgtttcaacatccatgccgctttgtcggcctgcttggacctgtcccatagcaatagaagtttcagtatggcattgaaataactacacaacccctaaaaatatcaatccatgaatgttctaacaaaaaatcaataaactataaaacaccacataagcgcaaaattcaatatagaaatccgaaaaatagatttttacatcatatatcacacaaaaacatcggcgattctcatgtaagtatcctcgcttcagttccacattctttttgaaatttccagtttatcggccatcagccggtatgcttttggtgtcagattatccggggatgcatggggccgctcaatgttatattcagccagcgatccgtcatttcccgtgcttcattcaacgttctaaataggcaaaatccagtatttcggtccagtacgtcttgttaaaacgtaaaacatccgataaacgcgttcagtgtcggcttacccggtttgatgaattctagccgcacaccatgggtcttcagcccattgtgcaaagccagtgatatcagttccaacccattatccatccgcatcttcagcggatatccacggttttcctctatcctgtccagctcgcggacagcacgctgcgcttggatagtcaggtcaatttcgatagccagagctgcacggttaacatcatcctttaccttgaagcgccgaaaacgtcgatcgcacaccaactcgtcgtgcataaaatcgatagacccgctctgattgagtactcccggcgtggcagcggagtcggattacgataacatagcggggatagcgctcagcattccagactcagatctgcaaccatctgtttcagaagatgattttatcctcaagatctttcatctttttcatatcagaggctcgcatcccaacttgcttggctctccagttgtagtctgaggcttcagaaaccccagctgcgcggcaggcatccttaacggtgcgtccggcttcgacggacttcagaacggcaatgctctggtgctcagtgaatcgggctttttgcatggtgaacgcctaaaaagacataattaatatgtcggtagatctttagaagtaaatggttcgttttgatggaatagggacagatccaaaggctgctcaatttctcccgtcagatatttatgagccaacattaaacagctacgaatatcagcaacgataccaagaatccgcgaaaacatttcatggattgaacacccggaattataatttgaaggagagatagttgaagagttttccaattcgccttctctttcagagagattaaatagtaatactaaagaatcgtgaacacttattgatgaacaccgaatcccaggggtgaactctatcaaacaagggctattccttcagacgtatctgaagacgaacaagccgaacgaaggaaacgctcaaatgtaggccataatgtaacaggaataatggctcgcaggtttgaatcctaacgtcagggtgaaatatatacaatcataagattaacaagtgagatagtcacaattgtgctggcagacagttttgacagtgaacaagatatataattgatagcatcaggggccaacccagcctatatcccgacaccaacagcaaatgatgccattcgagatgcaggtaccactggtgtcggcgttttggccaaatatcttaagcaaaaagtggcaagagcgttgatctcaaaagttatctcgcccccctcagctattgttaaagaaaaataggttttacttttaaaaaagaacgtttaattaagagctaactaatcgagattgcctacagctatagcgtcggctatcttatatttactcttgagaaaaaaccaacaacaactattaccaacagtttgttaaactcaatatcacagacaataatttattattgtaaacagaaaaaatcatgctttcggaatataaaaattctgaatatgagcaaagcctcaaactcatttaacaatcggcgcaaatgctatctatttttaattatagttccgcatctcacccccttaattcataccttttttgtattagcgtagctcgaccactttgaattttatacaatgtaatcaacttataattcccaacgtcattatctagcttaataatagacattagatatttatgttctatggatagcatatcacggaaatatgaagataactcatttctgatagtagagttaattccagtgaataacaggtttataaattcatcgactcctacccaacctccatccggtttactttttattacgttgattatgttatcttttggcaccttggagagtaacaatatgaatataagttcaacatggctttcatttatggagtttatatttatatggactttatcatcaggtaaataacagactctatttttatcaaaatttttaattttatgttccacattatttcgccccagaatatctataagatattttgagctttcttcccaaactttctcgtcaacgccaagttttttagctatatagtctaatttctccctatctatcttagctttgtatctcaaagtataaaatgcgtttatattaaaacactctgtaatagaaataattgataaatttaatgcagtaccacccactattattttttcattcacaatcaatacttcatcactctcagcactcatatttatttttttcatagcaatgccttgcacacttaataaccattccttttctttatttatctccaacactcttttgtgaaaataaaagaatctactccaaacatcattcaccttcatcaaggctgaactcataagagaaattataattaaaacaaagatcagtgaaatacctgattgtttcttaattaacatttaatcactgccattcatcatgattattttattaatttcaccatacttatccagatctataataatttcaattgccatcggatgtttactaaattcattccagtaatcttgccatttaccttttgagaaaaacctaaactttatgcttttcactcctgttaatattcgttcttttatcacttcacctgatctctgaggataaaataacgcatcatcaacattaattgcgcgaattctctctaaacttttattattaatcttatatcctactttttccaactgatagtaataaccgacactatttacattaagtttattattcctcactatttcaatagtattggatacacctcctgatttaccaacaaagaaatcgataggaccattattagtgatctcttttggcgttcttactatcgcatgagttaaatcattctctatgatataaatagaatttcttatatcttcaagttcatctaaatgactgatcacatttgacgtcgttctcaatgtcacttgcaatacctggtacatggctaaactcaatagtgaaaagatactgattgccaaaatcacttctataaaggtgaagccattgttatatttcagaatcaatttatcaccctgtaatatttaaaatgtaagggagtatccatattattttcaattttcacttcaatatctattaacatcaaaccaaaatattcaacatcttcacttctggcgcgccactgccattttttctcgatcatatattcatcaccagagatccaatcattaccaggaggattgcgattaagtatcatttcatttaatttattttctgctattaacacagaaaatatatcactcttaacctggttatttaagtatatgctttgcgtcataaattgaagtatagcaagacctgtagtggaaaatataattaaggagaacataacttcaagtagagtcatccctttacttttttttattattacatctgaaatattcatgttcttgttatatttaaagaatagttattataatcaataacactcactccgtatttatcatacagatttattgacaaacttgattctggtaataatgggtaaaggatgaaataaaaaaaatgatgttctgagtttgcatctccccattcatcatacccagtcaacacaactttcatatctaacactgaattgccaaaatctctttttaatgcttttcttccataatatacttgctcccaggatttatctggccaaaacttgctctttgctattttattgtccccgttacattcttttaaacatagtttttctacagcccatccctttacatttattctaataatgtacacagtctgctcaaacttccctagttttcttatccaatctatagtggtatataaatgctcggcctcagtaatagcatcttttttatcatcctttattttaaaaatagctattacagacatggaggataaaataaaaattaccaacattatttctagcaatgtaaaaccataaaacctagttttgcgttccgctatctgcatgctcatttagccaattacctatatcatcgctagtgccgatttcaccatcaggacctttagataaaacatctatactgttataaaaaccaggattttttattatataactattaccccatggatctttcggcaacctacgtaaataaccaccagaccgaaaattctttggtaaaggctcttctaacggcatttccactaatgacttaattccttgctcctcggaagggaataatccattatccagcctatacatatctaaagcattttcaaacgtagcgatatcagtaataactttttgtatatcagccttacttttgtttcccataagattaggtatcgttaaactcgccagcaaacccaaaatgacgataactatcatgacctctagcaaggtaaatcctttgtaatatctactttttttacacataatcttttaaccgccccaaaataaattaagccatattgttaagtaacaatattggctgtaaaacagataaaacaataaatagaattaatgaagccattatgatgatgagtgtcggctcaaatatactcattgagatctctatgattcgttcaaattcctcatctataatatctgccgttttttctaacatgatatttaaatcaccgcttttctcgcctgaataaatcatatgtctggctaatggaggaaaaatattggtatgactcaatgcagccgaaagactcgctcctttttctaccaatgatactccctgtttcatttctagtttaattgattcgttagttaaaactgtcaaaccaattttcatcgattgcatcaaaggaatcccactagagcacagtatagccagcattcttatatagcgtgaagcatgtatctttttaatcactttacctataactacaatttcaagtaactttctatgaacatagaatttatattttaacttcctcataccaaaaacattaatcattaaaaaaatgacaatggatatcattaataatgaaaaataactgctcataaagtcacttatcgacattaaaaccctagttgatagagggagattttgtttcatgaaaacaaactgttctatgacttctgggattaccgcagtgagtaagaccgaaataactgcaaaagacactaatataagcatgacaggatagactaatgcctgaatgaatttatttttcttaagatgtgacttctcaatattatcagccaaccgtttcaggataagatctaactttccggatgattcaccagattttatcaatgctcggtacaacacgttaaaatctcgtggaaatgattccagagaatcagataatgagtagccagagataatattatttcttatcttttctaaagtgatagatactgattttcgttcagtttgctgcgatacggctaataatgcctcatcaactgggatggatgccgaagttaaaatggcaagttgtctcgttaaaaccaacagttctcttttattaattgttttcttgattcttccataccagtttataacattaactttttttatatttaagagtgttaatccacgagcacgtactagctctcttgcccctcggatactttccgcttcaacttgccccttacaccttgagccttttttatttatggcagaatatttaaatatgatcatcaatattctcccgagtgactcgaatcacttcctctaatgtagtcattccttgtgttattttaactatcccactattctttattcccactgttatttttcttgcgagtttctctaactcaatctcactacctcgtcgataaatacagttccttatactttcatccacaataagtaactcatgaatagccgttctccctctataaccaataaaattgcattgttcacacccaacggctttaaaaccggaaattaagccattatttgcctcatgcaaatcagaaaattgaaactggtgagggctacggcagtaaacacaaagttttcgtaccaaacgttgagaaatgaccgccagcaatgagcttgccaacataaaggtttcgatccccatatcttgcaaacgagttactgcgccagtggcggtattggtgtgcagcgttgagagtaccaggtggccggttaatgaagcctgagtcgctatcttagccgtttctgtgtctcgtatttcgccaataagaataacatcagggtcctgccgtaaaatggcacgtaatcctttagcgaagctcatatccactttaggactaacttgcgtttgcgcgataccattaagatcaaattcgatcggatcttctattgtcataatattacgaacgctactatcaatttccattaacgcagcataaagtgtcgtacttttacccgaaccagttggccctaccaccaatatcattccatgaggttgctgcaataacttccttattaacttatagttaccgtcctccaccccaagagccttgagatctaacttcacactacttttatccaaaattcgcagtacaacccgctcaccgtggttagatggtaaagttgacaccctgacatccaacgctcgcccaccgactcttaccgcaattctcccatcctgcggcactctcttttccgcaatatctagtcttgccataacttttattcgggacaccagtaaggccgttagttccaccggcggttcaagaatctgatttagcatgccatcaattctgaatcttattagcaatctttgctcgaagggctcgatatgaatatcggacgcagcttgcttcactgcttcagacaaaacggcatttataaggcgaataattggcgcatcgtcggtcgtatccagtaagtcatcatcttttggcaattgttctatgagggtgctaagagctaattcattaccgatatccgtcattatttgatgggcttgctgggcatcattctggtagaaatcgaccaacctggattcaaactcctcatcggtaaccaaggccagtactacctttccagaagcaactctctgcccttcgagtaaatcatcaaacgacgctgaacaacggcaaactaaatgacaaccatgttccatagggataagtaatacgccatattttcttgcccaactaaatggcataggtttattaattatggttgtcgacagcgacttcaattaacaccccctctaccataaaaagagttaatatctttctttattaaatttattacctctttattatttatagtagacaatctacgaacatcactatattcattcaccttaacttctgaattgactaacaagcttctacttttttcatttttttcattgaaagctctaaacttatctgatgtttcatataaatattcatcagcctctcttattattgtaggcttaatgaacaaaattagatttctcttttctactctatctttattttgtctgaataatgcgccaatgataggaatatcaccaagtataggcactttgtttataacattcgtaattttcttgtctaataacccgccgacgacgactgtatccccacttttaaccagcacggcattattgacgattcttttattgaacgttgaacctatattatctttatctgcactagagttctctgccacacttgatacctcttggcggatctccagtaataccgtatcccctttatttatttgtggtttgacctttaaaataataccgactgactgacgagatatcgtgttataaaccttatctgtgggtgtcgtttgctgtgatgaaagaacaggtacttcttggccaacgctaaattcagcatccatattatccagtgttactatgctgggcgtagccagaatatcattacttgaatttgtagccagagcggtgaataaacccgcccaatttccacgataaaatcccgtcgccagcccgctcataccattcaccacagcactcatattcccttgagcactattggttatttttccagagtcaagcaaactaacaccaccaccgtgactgtttgcccattgaatcccaaggttcatgccttcaccatcctgagcttccacaataatggcttcaaccaggacctgagcacgcctaatatcgagcttagttataacctgctctaaatcatacataaccgtaggcgctgcactaataatcaatgcattagtctgattatcagctttaatcatgatttttttatttggggaaaaagcaggcactgattttttcttatcatcttttaggctagaacttacaccatttaacacatctagtaagttttcagccttggcatacttcaaataaatcacttttgtatttccatctgccgtctgttcctgatcaagtttccttattattgataccgtatttttacgagccccggcatctccatttatcaggattgaattagttctttcatcagcaacaagctttacttcctgcggcatttctttctttgacgagctgtttgctctcaaaagttcattgacgatccgtgcgatatccatcgcagatgcatgtttcagcttaaagacttctgctattgagtcactttcacgatcaaatttatcaataatagatattaatctattgaccactgcggctcttccagtgattagcaacgagttattcggttcgtaatgtacgatactgccagaatctgtattatcatttaattgccgtaataacggcgctatatttttagctgaaatatactttaacggcactattttattaataagctcatcaccattaaaaatatcatcctgcgtaataattactgatgctgagccttttgctcttttggcgggaactaccttcaatatattattcggcatctcaattacagtaaaaccatacacgtcaaggacgttaagaaaaaactgtcgatacttatcttcatccatattttcgtaactacgaattgaaattgtcccctttactttaggatccatgattatagttttatttaatatcctacttgccgagtttacgaactctctgatatcagcatcttccaaccttacagtgtaatcatttgcataagttacaaccgaaaatagctgtacagctatgatggcgacagacaagcacagtttgttttttatatttataaaaataataaaaaacaaaaaaaacggaaacttacttttttccacataaatagttcttataatagagagcggcattgcttacccctaagttatgagattatgaattgattacataacgccatctcttaaaatcattataaataattcactattcttactaactacaattccatcttcaattatttttaaaattttagtctcaccatcactaagaaaatcatttttaaaatacgttttatttatctgattacttgaaactatagccatagatgatgaattagaactggttattgttcctgtcaggcgtgaatccccatagtattttttaatgagtaaaaactcatcacgactcatattttcaacgtcaatatcatctaacttttttgtgtatgtagaaacagctttttctttttcaccaaatataccaatggcttttactctatctatatcgtaattaattttatccaacgatactttctgatctaacttaacctttctttcatcatttttatataaaataacaacgtcattgttggcatgagtttcgtcataaaaatcatttattaataaaaatgcattatatatacaaaaaattacgggtaaaaaaattgaaaacctgtgagaactacttaacaaaaaggtggcataacttaatttaataattttaagcattgaccacctttttccattaaaagtatgttacttaaatatagctgataagtgctaattatttttagcacttatctaactactaacttgagatcaacaatagccataaaaacgatcatcacaatgattatttcctgtagcacacagcaaacttgtatcaaggcgcaagccgtatctgttgatggttttaatgatatcggcaggaatctcaaattcagacagtaaggttctaaatttgtgaattaattgatggtaattattatctgaaatacctttatggttttcataccaaacaacctttataatatcttgctttctattcacatcattgaataagcacataaccaagcgtttttgcttttcattaatgttgatagttagctttctgttatgaaagtggattttattcatgcaacaatcaacggatacctcagaaccatagtcaatgatgccttttccgttaatgtcgataaacttactctcagtaactactgacacagtattaacatacatagataactccccaagtaaaataataaaaacaaaaaatacgtaaaatcataattatcaataaataataagtacggtaataattattgttatcatccgttagataaagcaaatcaaattatataaaaagatatatttttatatattatgttttccaaagcaatctttcacatagactcaaacgcacgcaagccactgaatacatgaaagaaaaatacaaaacaaagagcaatgatttttgaatgttaaattatcacagtcccttttcacatcgaaatcatactaattaatcattatgcatatccatataattacatttaatctttaagaaggtttaggccttactgttaaaagtacagataattactgcatttgaaaagaggaatttatcgaaataagtaacctatatataacagttaaacttaaacttataacagaataccatttaatatgagttatcattcattataccgctgaaataagtaattattatcatgtaactatagttcataagacatctttacttttataagaattatataattacatctaaattcactagctaatgaattatttatatctttgatgataattttgtattgaatacgaatatcacatcaaaatcagttaagttaagttaagttaagttaagttaagttaagttaagttaagttaagttaacacacaatacgaatccagactaaacaatcaaagaacacaaattaaaattaatagaattgattccaataagaatattttattaatgatgtttatatatttaatattgcgtgaacatttaatttattattatctatagttcaacacacactatataaaattattaataaaatagaaatttttatttttaacatcgatgtggataatattaagttcaatttactacatgctgttacattgtaagaaaaaactattacttcacaaagtgaaactccaattaaataaaattacgacataagtttatcaattaaaaacggagaccaacgctaaccaacttaaggttagtgataataatacattagcatagccaactcgcaagaatagcttatttgctttactgaaaaccattaaatttaaacatcctctcatagaccgaacccgctattttttatttaattaatcaatccttactcaaaaattcaataaaattaaaattaaaaagttgggtgtaatatgtaatagacgtggctttatcgtgttcggtagttagtgaatttatagttttttttgcattacagcatttagaaaatggcctaaaaaaataaactctatcaaggcactataaagcaagctgaaaagccagctcagaaattggaagtatatacatacaatattgatgaggtagcgacccagcgtaataaaaatgaacttaagccaaaggataggcttagccgcggctggatacgttttacaatgaaaattgaccgcatccactgtgaacacgatgctaactgctatgcggtgagtaaagaaggtaggatgggatttattttcgcccaacgatacattgcccgcacaatacaaagttagatgattttcaatggctcaaataatttgatgctgggaataccttagatacgtttacagcaaatacaaccatcagggacggtattgtgattgatgcttccgactttaaatataagtgttctcttctgacgctaaagcaatgcttggagcaagtattatgcccaagttaaacggcaactttctaaatttatagcggtttctagtttaagattatttttagattgttgtgcacacaacgagtgggctaatagcttatttaagcactaatcgccattttcccaataggatgatgatcgccgtcatacatagctatagcaatatttatgggctatacgctgaagaagttcttaggcgagcattgagttgtcttgcgcttcgttctattcatatcaagatccacgcgtagaaagcatggcatgtataaatttttaaggtgggaaatttatctgcggataactatgcgttttgcagacagaatctatgagtatcgactgatacaacgagggggaaaaatttaattcattgatataaatggatttattagaggttgggaaatattctgagacatgtttttggagcgggtgaagggaatcgaaccctcgtatgcagcttgggaagctgccgttctaccattgaactacacccgcgtctatgtgcgagtggcattataaccggttatgccttaggggcaaggaaagatatgctttaactgccggaattttaagctgttagcgttgttattttcttaactggcttatttgatagctgtaaaaaagggcgcctaagcgccctcatcgataaagttcgggattacttaaccggacgcatcgcagggaacagaatcacatcacgaatggtgtggctgttagtaaacaacataaccatacggtcgatcccaatgcccagaccagcggtcggcggcaagccgtgttccaacgcagtgacataatcttcgtcgtagaacattgcttcgtcatcgccttcatctttagcacgaacctgctccgcaaagcgctcggcctgatcttccgcatcatttaactctgagaaaccattaccgatttcacggccgccgataaagaattcgaaacggtcagtgatgaatggattatcatcattacggcgagccaatggcgaaacttctgctgggtattcagtgatgaaggttggctgaatcagatggctctctgcggtttcttcgaagatttcacactgaacacgccccagcccccagctcttctcgactttgattcccagagactcagcgatagcaacagctttatccatgtcgtccagatcggtaacgttggtttcaggacgatatttgcaaatcgcttctttcatggtcagtttggcaaatggtttgccaaaatcgaattcctgctcgccgtatttaacgacgctgctgcccaaaatggtttctgtcagcgtgcggaacagttcttcagtcagaacgatcagatctttgtaatccgcatacgccatatagagttccatcatggtgaactcaggattatgacgcggagaaacgccttcgttacggaagttacggttaatttcgaatacgcgctcaaaaccaccaacaaccaaacgtttcagatacagctcaggcgcaatacgcaggtacatgtcgatatctaacgcattatgatgagtgataaacggacgagcagatgcgccgccaggaatcacttgcatcatcggcgtttcaacttccataaagcctttttccaccatgaactggcggatgccggacattacctgagaacgcactttgaaagtattacgcgattcatcgttggcaatcagatccagatagcgctgacgatagcgagtttcctgatcggccaaaccgtggaatttgtcaggcaacggacgcagcgccttggttagcaagcgcagttcgctacagtggatagacagttccccagttttggttttgaacagcttaccgcgagcgccgagaatatcccccagatcccactttttaaactcttcgttgtaaacgccgtctgccaaatcgtcacgggaaacgtacagctggatacgaccgccgacgtcctgcaaggtaacaaaagaggctttacccatgatgcgacgagtcatcatgcggccagccacggtcacttctacgcccagcgcttctaattcttcgttatctttatcaccgtacgcagcatgcagttgatctgagaggttctcccgacgaaaatcgttcgggaaagcaatacccttctcacgtagtgcagccaatttttcacgacgcgcctgtaattcactattcagttcttgcacttgctcagcgacttgtggtttttgctctgacatttcagttcctcataacccggctttcaaacttgcctcaatgaatttatccaggtcgccatccagtacggcctgcgtattacgcgtttcaacgccggtgcgtaaatccttaatacgggaatcatccagtacataagaacggatttggctgccccagccgatgtcggatttgttgtcttccaacatctgtttatcagcatttttcttttgcatctcaaactcatacagcttggctttcagctgtttcatggcttgatctttgtttttatgctgagaacggtcgttctggcactgagtcacaatattggtcggaatatgggtaatacgtaccgcagactcagttttgtttacgtgctgaccaccggcaccggaagcacggtatacgtcaatacgcaaatctgccgggttaatttcgatatcaatatcgtcatcgacttccgggtagacaaaagcagagctgaaagaggtgtggcgacggccaccggaatcgaacggactcttacgcaccaggcgatgtacgccggtttcagtacgcaaccagccgaacgcgtattcaccgatgatcttgatggtggcagatttcaaacctgcgacgtcaccgtcagattcttcgatgatttcggttttaaagcctttggcttcagcccaacgcagatacattcgcagcaacatgctcgcccagtcctgcgcttcggtgccgcctgaaccggcttgcagatcgagataacagttggcgctgtcgtattcgccggagaacatacgacggaattccaactggcccagtttgccatcaaggatttccaactcggcaacggcttcgtcgaaagtctcttcatcgtcggcttcaatagccaattccagcaagccagaaacgtcttccaaaccttgagccaattggtcaatagtggtgacaatttcttctaatgcggaacgttctttacccaaggcttgcgcgcgctcgggctcattccaaacgtcaggctgctccagctcggcgtttacttcttccagtcgctctttctttgcatcatagtcaaagataccccctgataacggcggtccgttcggacagatcctggatacggttttttaccggattaatttcaaacatttttttgatgtcttaggttgagtcgttgatggcggaatgccattcgaaccgataattctaacggatctcaacgacggtttatagcaagttgaccgtatttatggcgctatctggacgaatcgcgccattagtcgcattttgcgaacttttaacattctgactaataaggccagaggtgctgaatcagcaattgaacgttgcggttaccgcggaattcattgatatccaacttataagccactttaacttcgcgcacgctgctatccggccataaagtggtatcaatattaaacgcgataccatccagcaacgggccaccgtttaacggttccagcatcactttcagatggcgttcccccaccagccgttgctgcaacagccggaattttccgtcgaaagtcggttcagggaaagcctgcccccaagggccgccgtcacgtaataattctgcggtttccagcgtcatttgcgcgccggtcagttcgccatcggaccagataaccccttcaagctgagaggcatccatccactcgcccaccaaatcggcaaaacgctgacggaactcgtcgaatttttgctgttccagcgataaacctgcggccatagcgtggccaccaaacttcagcatcaggccaggattgagcgtatccaggcgttccagcgcatcgcgcatatgtagccccgcgaccgaacgtcccgaaccttttagtattccttctcccgctggcgcgaaagcaatcaccgggcggtgaaaacgttctttgatacgcgaagcaagaatccctaccaccccctgatgccattcggcgtgatacatggcaatgccgtaaggcaactccgtgctggtacgttccagttggtcacaaagttgtaaagcctcaacctgcatgctttgttctatttcacgccgcgccaggttcaagctatccaaatccatcgccagtgcgcgcgcctgagcaatatcatcactcaaaagtagcgccacgccgatagacatatcatccagacgaccggcggcattcagccgagggccaagggaaaagcccaaatcgctggctgccagctggcgcgcatcacggtttgccacttccagtagcgctttgattccggggcggcattttcccgcccgaattcggctcaacccttggtgtaccaaaatacggttattggcatccagtggcaccacatcggcgaccgttcccaaagccaccaaatccagcaactccgctaaattaggaatcgccagcgctcgttgctcaaaccagccgctatcccgtaatcgcgcacgcaaagccagcatgaggtaaaaagtcacgccaacaccagccagcgatttcgatggaaaatcgcagcccaccagattggggttaataatggcttcggctgccggcaaaacgtcacccggcaagtggtgatcggtaaccagcaccttaatcccatgagcatgagccaaatcaacgcctgcatgggaagaaataccgttatctacggttacgataagatccgcaccgcgggcaataacctgttcaaccacttccgggctaaggccgtatccatcatcaaaacgatttggaaccagataatcgacgtggctgcagcccatactgcgcagagataacacggctaaggcggtgctggtcgcgccatcggcatcgaaatcaccgacaatcataatacgctggctatcggccaatgcctgctgcaacaaactgaccccggcatcaatgccgtccagctgttgataagccagcaggcctttcactccgcgctccagctcttgcgcccctttcacaccgcgagaggcgtacaaacgacgtagcaacggatgcaattgctccggcagcgcactctcatcggcaagttcgcgacgacgaagttgggtttttatagccactggcgatcaaccaccggttttcttggaagcctgatgcgctcgcagcatggcaagcatctcttttggcccctgatagcccggaacaatggtgccatcctgcaatacgatagccggagtaccctgaatgccgaattgcacccctagctgataatgtttagcaatatcggttttacaggttgccggggaaatagcatcacctttcatcgccgcatcaaaagatttattgcggttagcggtacaccagatagaacgcatgtctttttccgcctgagaactcagcccctgacgcgggaacgccagataacgcacggtaatacccagcgcgttatagtcactcatttcttcatgcagtttatggcagtacccgcaggtgatatcggtaaacacggtaatcacgtgtttttcctgcggcgctttgtagacaatcatttcaccgcttaatgcttccagttttttcagcagcaattgattagttacgttaaccggctgtgcgccactaacgtcatacagcgggccttgcagcagctgtttgccatcggcggaaatataaagcactccgctgtccgtcattaccgtgcttaaaccagcgataggggaaggctggatttcagcatttttaatatccagttttttcaatgtctgttggatagcagcatcatcggcatacgccaaaccagaaagcgaagccattaagattggcagcaacagtaaactttttttcattgaataatcctatttttcttctacagcgcaatcatgcgcgcggatggtgctgttgatgtagctgtttcaggcgttccgtcgctacatgagtataaatctgggtggtcgacaaatcgctatggcctaatagcatctgaaccacgcgtaaatccgccccgtggttcagtaaatgcgtcgcaaaagcgtgacgtaatacatggggggaaaggcgctcactatcgatacccgcaaggatcgcatagtgtttgatacgatgccagaaagtctgtcgagtcatttgctgactgcgattactggggaacaatacgtccagcgcctggccgttaatcaaccaaggccgcccatgttccatataattctcaatccagtaaaccgcttcttcaccaagcggtactaatcgctctttattccccttacctatgactcgcaccacgccctgccgcaaactgacatcactaatggttaatccgaccaattcagacacacgcaaaccggtggcgtacagcacctctagcatcgctttgtctctgagttccaaaggaatatcgacattcggtgagttcagcagtgcgtcaacctgcgcttcgcttaagtccttcggcaaacgttggggtaatttgggcgatgacaacagcgcggttgggtcatcttctcgcaatttttctctatataaatattggaaaaaccgacgcattgcgctcagcaaacgagccgaactggtagccttatagcctccctcaatgcgttccgccagaaaggactgcaaatccaaaggatcggcctgcagcaaatccttattgtggtggtgtaaccagccagccagcgcctgaagatccagacggtacgaagccagagtattttcggccagattacgttccagccacagggcatccaaaaactgttcaatcagcgggttattttgctgttgcatccagattcctctcatcgattgaactcagcatggcattatgcctgatgagggcacaaatctggtacactcgatgctattcctattcgttaatgctatggctacacaacatgaagattggtctcttttacggctccagcacctgttacaccgaaattgtggcagaaaaaattcgcgatattctcggtgaagatttgatcgatctgcacaatctgaaagacgcagaccctgcgctgatggaacagtattctgtgcttattctggggattcctacctgggatttcggcgaactacaggaagattgggaagcgatctggccacggttgagtcagttgaatctgcggggaaaaattgtcgccatgtacggtatgggcgatcaattcggctatagcgaatggttcctcgatgctttaggcatgttgcacgatcatattgccccactgggcgtacaatttatcggtttctggccgacagaagggttcgaatttaccagcccgaaaccattaagtgctgatggtaaacatttcgtcggcctggctctcgatgatgtcaatcaatatgaattaaccgaccaacgcgttgaacagtggtgtgagcaaattctgattgaaatggaatccttgctgtaatgccagctgcgggcgcaatggctgtgcccgcagcttcgaaccttctcgcggttatttccacagacggaaatgttcacttccggcgcagcctggcggtggaatttcatgacgttcgtcagcaggttttttagcaacccgtctctgcggatcggccaactgataccaatccagacgccgagtgagcaacatcactaccgccagcacgacaaacagcaaaccagatcctaataacaacgcgttatcttctgattgcagcaatccgtaaagtaccccatacagtaataataaactgcctgcaaacagtccgcctcgcagccaactacccagcaccgcgcctaaatacaccacaatcaacagactacaacttaggctggccaccagataagccaaggcaaaaccgatatgctccgacagtgctagtaacatcagatagaacagaattaacgctatgccaaccagtaaatactggattgggtgcaaacgcagtgacgtcaggctttcaaacaggaagaagctgataaacgtcaggccgataaacagaatcgcgtatttaatggctctttgagttaactgataatgattgaccggctcaatcaagctggtgctgaaagcgggtaacgcatcaaaatcaaacggcacttcatctgtagcaaaaatcacgttcagattattagcaaaccaggtgctgctccagtgagcctgaaaaccattcgcgccaacccgtcgttgattcggcaagaaatccccgaggaaattagggtgcggccagttactttccagcgtgagttcactactgcgccccaaaggtaccaaggacaagctgctggttcccattagtgtcagagtaaaatcaaccgtagtttccccttgctgtaaacgatgcaaatccagcatggcgtgaatcccctgactccccgcgcctaagtaagcaccgggctggaaatccatcgcatcgccgttgattttcagcggagacagtttctgaatccctcgcgcatcgctcaaacgcaccactaaaataggttttccaaacgtgattccgggtctgttgaggtaatccaggttttcactatcaaatttggcactgaagtgcagcggaccctgatagacctgagtacgataaatgccaagttgacgtacatctacgtccggcgatcccgttacggataaggtttccggcagtagataatggaaacggctaaccttttcctcgcgctttacgccttctttttcaacggtgaccatttcgctgtaaggcacaacgatcaacggaccaagaattttttgcgcgccactagtgctatcagtgactttgctaatcacgctgtaacggtagttgcttcgttcgctaatcacgctcatcagcatttctttgggaatcatcatcagtaagatcaatcccagcaacgtggttattttccagaacaatacggatttaaacataagtgaggctccttaacggtcatgaagccagaataagacgcggaagtgaaagcagaatgagcttgtgtgaagtgagtgtgaagttatgggttttcttgcatcagcggcaacatcatttccacgcgaaccccctgtggcaggcgattagccagccggatggtgccttgatgaataacggctacttcgcgcacaaaattcagccccagaccggtgcttttcgggccatcaggacgcggaagagaataaaaacgttcgaaaaccttttccttagcgtattcgggaataccacagccgctatcttcaataatgatatggtagttatttgcccgctgttcgccacacaaggtaatttcgccacctttcggggtaaaatccagtgcattatcaatcagattagtgagtgcctgactcaacattaaaccgtctcccgccagcacggcgcgatcgcaacgttgtaaaatcaaagctacacctcggctacctgcctgagcttctttaccagcaataacctgtttaagtagcgaatcaatgctaagcggttccaactgtaggtctacccgactttccagacgtgcctgtaccagcattttatccactagttgctgaatacgagcgctttgctgttcgatattcaataggaatcgctgtgccgtggccgccggaggtgcttcccgcaataactctgctgcgccgcaaatcgcagccagcgggctttttagttcatgagtcaacgtgtgaacgtattgctcaatataggccttgccatccaactttagccgcatactttctagcgcacgtgccaagccgcccagctcgctgctgcccattttgggcaacggcacggcttcgccctccgcaacccgctccgcgtaattaaccaatcgaccaattgagcggttgatccaccatacaaaacccaggccaatcaataacgcaatacccaacagaaccgcaccagccagaagtattcttcgttcactgcgtttaataaccggagccatagagaggtttggtttccccacgctcaacacgccaatgatttgattatcaaccattaccggagcggaaacgtacatcactgagctttgctcatcgtttggatcgctcaaggtactacgtgcgccgtattgaccgcgcagcgtcagccagacatcattccatttagaataatcctgcccgagagcctgcccggtggaatcaaaaatgacctttccgcgggcatcagtaagataaacccgatattcgttacgatctttgcgaataccggcgatattggcaccaatcggcttcttattcagcgtggcgaacgcttccgccaactgcccattcgcggcattacctcgctgcatatcctgccgggcaaactgcgctagcaaagtagcagtatccaccagcgtcccttcggtcgcacgcctcacgccgggtttcacttcctgcacaaaaatactgatcacaaagtagccggcgatcgccactatcaaaaaatacccgagcaacagacgcaggccaattttcatgggacatagctcagactgtagcccagcccacggtgagtacgaatcggcggttcttcatcccgaacagcgcgcaacttagcccgtaacgttttcacatgggtatctacggtgcgatcctgactttcttcggcctgagtccagacgatatccatcaactgttgacgggaaaaaatgcggtccggagctaataacagggttttaagcagtaaatattcgtaacgggttaaccagagaatttgttgctgataggtaatacgcgcggcggcttcatccaacgtgaaagcgccaaaccgatgaattagcggtacgggtgcgctggactgcgacttctgtaaacggcgcaaaatggtacgaacccgtgcgctaacctcgcgcggagaaaaaggtttggctatgtagtcatcagcaccgatttctaacccgactatgcgatccagttcttcactgcgcgcagtaagaaagaccacgggtaaatccggagataaggccaacagacggcgacaaagatcaaaaccgttaatatccggtagcccgacgtcgataatcgctaacgctggcaggccgtgatgtaacgcagcaagcgctggctcgccgcgatcaaaccacttgagggtgaacccttcactctctagcgtatagatcagcgtgtcggcaatactcggctcatcttccaccagccagatcaatggtttcattacttactacctgctgcagaatcaaaagtgtgttgaaatatcaggcacagctcgcgccattcatcttcagacatgctatcagaggctagccagacgcgctttctacgctgactgccggcgccttgaagcgataatagtacgccataacgggtaatccacggctgtcgaaccaacttccattcctgacgtttccatatcagcagatttccagcttttaaccggatttctccctggcgggaggtaatgcttttctggctacgaatacattcgaaaacgaccagcgtcaacagtatcaaccataaaggtgtacagccatctggccaaggcgcgaccagcgttatcaacaccaaaacgccatgaatcaataaggaaaaaagttgggtgcgccatgaaacccgcaggtcacatcgccactgggccacgggctttatttcgcatctgaatcagttgaaccatccgtttcagctcgctgtcctgcggctccccatgattcatcagccagttgaataaatcaggatcatcgctcgtcagcaagcggacaaacacgcgcttatcgtcatcgctcagcgtgtcatattcatactcaaagaacggcataatggagatatccagctcacgcataccgcgacgacatgcccagtggatacgagctttattatcaatttccatgtcctgattgaccccttgcttaaaatgttatttgaatctggccggatggccgctctgccaaagattcaactcgtgaatagagtagcaatttgcgacgcctgacgggaaggttatcgccactaaaacgcggactaaggcgtgaaatgataaagcaatgtggattttttgaccgcattaatccgcgctcgttgttatttttgcgcattgtaccgcaggatgtattgtaacaatggtgtatgcggataattactctttgcaaaggctcccgcctcttttaccattgggtcatcagtccacggcaccttttggtaggatgtaatatggcatatgcaactccgttccctccgcgtcaaccctccgcctcttctgcgttacctttgactctgatttcattggatgactgggcattagttacggtaaccggcgccgaacgcgttaaatatcttcaaggtcagctcaccgcagacgttgatgcgctagcggtagatcaacacgttttgaccgcgcactgtgacgcaaaaggtaaaatgtggagcaatatgcggctcttccatcggggcgaaggattggcctttattgagcgccgcaatgtgctggaaaaccagttggccgagctgaagaaatatgccgtattctcgaaagtgacctttgctattccatctgacagtgttttgctgggaatcgccggggcgcaggccagagaagcgctggctcaggttttccctgaattaccgacggcagaaaaaccggtagtccaatccggtgatgctacattgctgcatttttctacgcccgcagaacgtttcctgttagtgaccgatgcagctcaggccgccagtttagtagagaaattgggtgagaatgcccagttaaatgacagccagcagtggttggcgttagaaatagaagctggattcccaattattgacggcccgaatagcgcccagtttattccacaggcaacaaacattcaggctctgggtggaatcagctttaccaaaggctgctacacgggccaggaaatggttgcccgagcaaaatatcgcggagcaaataaacgcgccttgtattggcttgtggggcaaggcagcagcacgcctgaagccggtgacagcttagaatggcaattgggtgaaaactggcgtcgtactggtacagtgttggccgcgattcaacttgaagatggctcgctttgggttcaagcagttctaaataacgatctggccgccgatagcgtgttacgcgtacgggaagatgcggcagggacattgcgtatccaaccattaccgtattctttagaagagaataattgatcctctgccaaaacaatttatagcccgtatcgtcttgccaggaaaacatagagacaaggcgagatcagaccatgcgagatctggcagtgcaagataaagaggccggtaatccggcctcacaatctacagacggtatctgtctttagcgaaactatcgtgatattcagggaaaactctggattttctgggtaacgcaacaatctagtgttctggaatagatttacatcttaaacgtacagataaattgccataaagtggcacaggctaccgccaagcacgaaaccgtgccaaatagcgtgaccaaagcgaatacgcttcgaagcgtaaaacactactcccagcgtatacagcaaaccgccaatcgccaacagtgcaataccgcctatatctaacttaatagccaactgatagataacgatcagggatagccatcccatcgtcagataagtaatgagcgaaagcacctcaaaacgatgcgcaaatgccagtttgaagataacgccaaaaagcgctagcccccaaataaccgccattaatcctctcgccaaagtagaatccagcccaaccaataagaaaggcgtataagtgccagcgatcaataaatagatagcgcagtggtcaaatttcttcagccaatgcttagccttttgatgtgggattgcgtgatacaacgtggatgcaaggtacagcagaataatgctgccaccatataaactgtagctggtgagcgcggtggtacttgcaccgctgtctacggcctgtaccagtaataaaaccaagccgattatgcctaataccacgccaataccgtggctgacgctgttggctatttcttctgcccaaggataaggctgagcttctgataatgccggtttgactgattcattgttcaatactaatgtatcctgttgattcttatgggtgcgggtgatggacattctgtcaggttttgacctgttcattattattggaatcctcgcaggttaattgtgcaaaaataccgctttaaggttatctgagaatcattccagtgtacacgtgtaagctcaaaataatctgtcattgtttgtaaaccttggcctgcccgcccgagaaaatcgataactgactaaaaccccgctcaggttagcgaaatgctgcacagtctggcctacactctatccgcgccattgttggtatacgccctatttttctcgaggtttactatgtctttcgttcgaccagttctggatttcggccctttgactgattcaattcagtttttgatggaaattgataagctaaaaagcattcaacgcagaaccaagcttattgcctgcgaacgtcaggaaaactcggcggagcacagctggcatttcgccgtcgccgctatgacactagcaccttatgccagcaaagatgtggatatcaatcgagtgattcaaatggcgctgttgcacgatatcgtcgagatcgatgccggtgacgtgatcgtctacgatctggcggcgcgcgcagctatccatgataaggaagtcgccgcagccaaacgcctgtttggaatgctgccgccggaacaaaatgcaaaatttagtgcgctatggcaagaatatgaagatgaaaaaacgcctgatgcccgttttgccacggttctggatcgcattttacccatgctgatgaatttgcataacggcgggcaaaattgggtagaaaacggcattcgcctagagcaggttgtcgagcgtaatcagctagtggctgaagattatcccgagctgtggagctatttatttcgtcatttacaggatgcacaggctaagggctggttggcctgagacatgacgaaaatctcagcgataggttcaagagtaatgcttcatattgagcattgagcattgagcattgagcattgagcccagagtttgaatatctgtacctgaataactcatatttaaatcactagcgctggaatgacgatcatcctaataatgaaacctgctgcccgtattttgctcgggcagccttctcaatcaaagtgttactttccacctgccaattctagtgcgctgccggtaacgtaagaagcgctatccgatagcagccaaacaatggcttcagcgacttcatcgggctgaccaccacgtttcatgggtagctggctcgccactctttcaactctgcccggttcaccgccgctggcatgcatttcggtatagataaaacctgggcgcacgccgttgacacgaataccttcccccgcgacttcgagcgataagccagtggtcagagtatcaattgcacctttcgatgcggcgtagtccagatattcgccgggagcccctaaccgagcggccgcagaagaaacgttaactatcgctccgccgcgaccaccgtgtctttttgccatacgttttaccgcttctcggcaacagagaaaatagccggtcacgttggtactaagtacccgattaattcgttccgcactaatcccttcaattcccgattgttgaaacaaaataccggcgttattgaccagcgcagtaatagtgccaagctgattatctaattgattaaacaactcaataacttgttgttcgtcggcgatatccgcctgcaaggccaccgcccggccgcccatcgccacaatctgatccacaacctgtaaagcggcttgatggtcgttgacgtaattgatgccgacctgataaccctgctgtgccagtaataatgcggtggctcgccctatccctctgctgccgccggtgactaatgcaattttttccatagcatcatctctgctttattttgttgtacggtctgacgtcagaaaattttcgcccaaatcagtacccctacctgcccgatattattcatcggcattgtcggcgtacgtaggatcagtcgatctttttcaaactcatagtaacgaaccatctgggtgccaacccaattaggaaataggccaccttcaacaatatgagtaatactctgtttttcctcattaatctgataacgaccaaagtagcaaagcgcgctctcgaaagccgatttcatttccgcatcactgccttccagccagtccagagaggcgaaatcacggcgctcagtggtataaagctgagcagccatagtgccattttttttgtaatgtatccggcctgataccttctcgcccattgggaaagaaacactgccgtcttgcaaaataaaatgctgtgaaaattaagcccagctcccaaaaattctgtcactaatcattataattacgctaatatttgtttatatgaaaagtaatcgtagtcattgatagggttatattccaatcaggaaataatgcgcagaattagtaataacttttgattgtctgggcagattttagatagaaaaagggccgctttcgcgaccctataagcaggttactctttagtgattactcgtaatcaccgataggaacgcaggaacagaataaattacggtcgccgtacacatcatccagacgttttaccgtcggccagtatttattttccatcacgccagcaattgggaacacggccaactcgcggctatacggatgagtccactcacccaccagttcagcctgaatgtgcggcgcgttcaccagcgggttatcttctagcggccattcgcctttcaccactttgtcgatctcggcgcggatagccaacatggcatcaataaagcgatccagttcgaccttgctttctgattccgttggctcaaccatcagcgtcccggctaccgggaaggacatggtcggcgcatggaaaccgaagtcgatcagacgcttagcgatatccatttcgctaataccggtttcttctttcagtggacgaatatccagaatacattcgtgagctacgcggccatcgtggccggtgtacagcactggataagcattttttaaacgagtggcaatgtagttagcgttcaaaatcgccacctggctagcctgtttcagcccctgagcgcccatcatgcgaatgtacatccaactgattggcagaatagatgcactaccgaacggtgcagcagaaactgcgccctgctgcgtcgtcataccgtcgatttgcacaacgctgtgacccggaacgaaaggtgccaaatgcgctttcacgccgattggccccatgcctgggccgccgccgccgtgagggatacagaaggttttgtgcaaattgaggtgagaaacatctgccccgatataaccaggagttgtgattccaacctgagcattcatattcgcgccatccaaatacacctgaccaccgaactgatgaacaatctggcagacttcgcggatggtttcttcgtacacgccgtgggtagacgggtaggtgaccatgatgcaggaaagctcatcaccggcaacttctgctttctgacgcagatcgtgcaggtcaatattgccttgtttatcacaggccaccaccaccaccgacataccggccatttgtgccgacgctgggttggttccgtgagctgagcttggaatcagacacacatgacgccgggcttcattgcggctttcatggtaacggcgaatagccagcaaaccggcatattcaccctgagcaccggagttcggctgcatgcacacagcatcatagccggtcagttgcaccagccattgtgacagctggccaatcatttgttgataaccggcggcctgctctggcgggcagaatggatgcaactcggcaaattccggccaagtgattggaatcatctcggcggcagcgttcagcttcatcgtgcaagaacccagcggaatcatcgcctgattcagcgccagatcttttttctccaaacgatgcatataacgcatcatttcggtttcgctgtgataactattgaatactggatgcgttaaaatcgggtctttacgcactaaagcttcaggaattgagcggctttctttgctcacttccgcatccagcttatcaatatccagaccgtgttcatcacctgccagcagagcaaacagagtttgaatatcttcgcgagaggtggtttcgttcagagtgatacccaccgcgccatgaatatcggtacgcagattgataccaaagcttagggcgcgcgccaataccgccgctttgtctttcacttcaacggtcagggtatcgaaccaggttttgaaacgcagagtcagaccggcttgttgcaagccagcggccagaatgtcggtcatgcgatgaatacgaccggctatgcgttgcagcccctgcgggccatgataaaccgcatacaggccggcgatgtttgccagtaatacctgtgaggtacaaatgttggagttagctttctcgcggcgaatatgctgctcacgagtttgcatcgccatacgcagcgcagtgttacctgccgcatctcgggaaacaccgataatacgacccggcattgagcgtttgaactcatcgcggcaagcgaagaaagcggcgtgcgggccgccgtaccccattggaacgccaaagcgttgagctgaaccgaaggcgacctctgcgccctgctggcccggagcggtcagcagtaccagtgccatcaaatcggcggccatacaggtaattattttacgttttttcagcgctgtcagcagtgtgccgtagtcgtgcagctcgccggtggtgcccacctgttgcaacagcacgccaaagacgccctctagctccagcactttttcagcgcgatcgacgataacgtcaaaaccgaaggtttcggcacgggtgcgaaccacgtccagagtttgtggatgaacatcgtctgcaacgaagaaacggttggcatctttcactttgctggcgcgtttacacagcgccatagattcggccgctgcggtagcttcatccagcaaagaagcggaagccagatccagaccggtcaaatccagagttaattgctggaagttcaacagcgcttccaggcgcccctgcgaaacttctggctgataaggggtataagcggtgtaccagcccggattttccagcatattgcgcagaataaccggcggagtcagcaccgggctgtagcccatcccgatataggatttatagcgttggttttggctggcaatcgctttaagttcggccagagcctgatgttcagtggctgcgtcacctaccggcggcgggcccggcaattgaatatctgccggaacaatctgctggatcaatgcacttaacgaacggacacctacagtagccagcatttcttgctgctgctcggcgttagaaccgatgtggcgctggataaacgcgtcgttatgttcaagttggctgagagtctgagtcatttgctacaaattcctgaatcaagcatgggacgggatacggtcggtcgatacaaaaaaaagccccggctcagcaactgaaacggggcgatactcttattcgtccagcgtggtgcgataggcgtctgcgtccagcagactatccagctctgactcgtcagaagccttgatgctgaacaaccagccgtcggtgtaaggtgcgctgttcaccagttccggggagctttccaaatcggtgttaaccgcaacgatttcgccgctgatcggcgcatagatgtctgatgccgctttaacggattcagccacggcgcagtcgctaccggcagaaacatcgctgcccacttctggcagatcaacaaataccatatcacccagtaattcttgtgcgtgttcggtaataccgacgctataaacaccgtctccatcggcacgaacccattcgtgagaggatgcatacttcaattctgttggcacattgctcatggctaccttctccttagaagatattggtgatttattattagacgaaaattacagcgcgatcgctttacctgctcgcacaaaacccggtttggtgaccttaaccggcatagcgcggttgcggatttgcaccaccgcctgctcgccaatacccgcaggtactcgagccaaagcgatactaaagcctagcgtaggagagaatgagccgctggtaatcacaccgttgtgtacgttgcccgcatcgtcggtgaaatgcactggcagttcgttacgcaatacgcctttttcggtcatgatcaggccaaccagtttgtcagtgcctttggctcgctgctgttccagcgcttcacggccaataaactggcggtcttccggtagccaggccacggtccatcccatattggcttccagaggggaaactccttcatccatttcctgaccatataaattcattccggcttccagacgcagggtatcccgcgcgcccaaaccggcaggcttcacgccagcggctaacagtttctgccagaaatcaactacctgctcttttggcaaggcaatttcatagcccgcttcgccggtgtagccggtcgtggcaataaacaggtcgccggtttgtacgccaaagaatggcttcatgtcggcaatagcctgtttttgctctgcgctgaataaagtcgctacgcgctcctgagcctgcggcccttgaacggcaaccagcgccaaatcgtcacgcacggtaatatcgatgccgtaaggttctgcgtgctgagtgatccaggccagatctttgtcgcgagtcgcggagttaaccaccagacggaaataatcttcactgaggaagtagacgatcaaatcatcgataacgccaccagatgcattcagcatcccggtatagagggctttgcccggctgggtgagtttggcgacatcattcgccaacagataacgcaggaattcacgggtacgcgcaccgtgcaaatcaacaatggtcatatgggaaacatcgaacataccggcatcttgccgaacgatgtggtgctcatctaactgggagccataatgcagcggcatcatccagccatggaaatctaccatgcgcgcaccgcacgccacatgctggtcgtacagtggagtctgctttgccatcttttccctcttttcactcaaacagtgttccggacacaagagaaattcagggcaccaatacgcgataaagataactcagactcataaatagatttatggccttaccgctggcaccggctgacttgctcaacagaacgttgcgtcagaccaaatcatcagacttcggtgaacggtcgtgaaattgcggctaaacaccgagacgcaaacgatacctttcacctgacgttatcactgaatcgacaaaggaaccataagctaaattacaaggtgaacggttcagcaaccacaaaaggcaggggtattgtgcagagttttcaactggcaaactgcgtacagagacacaaaattaacaaataattagtaaaaataccgatgttatataactaaaatgccggatagccctcagtttcaacttttaggtattcggcacttcatgagaaaatgtaatgcgaaaatggtgctggaattagattttttcaatcgagcagctaaggttgcaaccactcgggaatatcattcagtcccattgcctgacgaaccagtttaggtttcaccccgggaagagagtctgccaacgttaagccaatgtctcgtaacagtttttgtgccggattattgccagaaaacagttcgcggaagccctgcattcccgccagcatcagtgcggcgctgtgcttacggcgacgttcatagcggcgtaagtataggtgctgaccgatatctttcccctgacgctgtaagcgacgtagctccgaaaccagctccgcggcgtccataaagcccaggttcacgccctgtccggccagcggatgtaccgtgtgagcggcatcaccgaccaatgccagacggtgtgcggcaaagcttcgggcataacgccccatcagtggaaatgtttgtctatcactttcaacctgacacatgcctaactgcatatcaaaggcaacacccagctcacggttaaactgctccggcggtaattcggcaagtcgtgccgctttttctggcgctaatgaccaaacgatcgaactgagatttggctcgctaaacggaagaaatgccagaataccgtcaccgtgaaacacctgtctcgccttagcctgatgaggttcttcggtgcgaatagtcgccaccagtgcatggtgaccataatcccagaaggtcagcggaatatccgcatgttggcgcagccacgaattcgcgccgtcggcaccaaccaccaatctcgcgctgagcaggcgatcgtcggtcagagtaataaaagcctcgctttccccccaggctacctgcttcaaacttgccggagccagcagagtgatatcaggcagttggctggcgcgctgccataatgcttgctgaatcactcgattttcaatgatatggcccaaatggctaaaaccgtactcatcggcgcggaaagcaattttaccgaagctgtcctgatcccagacttccattccgtcataaggactggcacgcatcaccagaatgctgtcccagacgccaatatgctgaagcagcttttcactggcggcgttgatagcagaaacccgcagttccggtgcgcccgtcagcggaacggggagttcgtcttccggctgatgatgctccaaaatggcaatacttaagccacttccctgtaaaccacaggccagcgccagtcctaccataccgccgccggcgataactaagtcaaatgattgcatgctactttatttcctgtcgtgaaaacggcaaagaacctgcccaccagcggcggcaggatctaaatggggtggattagcgctcaacccaccccagagtgcgtcgtgcaaaagcatcgcgcatcgttggcatctgttccatcgccattagccccaaattacgccctgcggccagcggagcgtaattatttgcgaacaaacgaatcaacccatcggtcacgccaatggttgcctgttggtccttgtaacgacgattttgatagcggcttaatgcggagtaagcgcctaaatcagttccagcctgcgtcgcttccgtcaaagtttctgccaatgacataacgtctcgcagaccaaggttaaagccctgaccagcaatcggatgcaaggtttgcgccgcgttgccgaccagcgccagacgatggctaatatggcgggaagcggtcaataaacgcagtggatagctgtggcgtttaccggctttcagcatttttcctaaccgccagccgaaggcggtttgcagctcagccagaaattccacgtcgtcccaggcgtcaactttggccctatcttgctgcggatgacaccataccagagagctacgcccaccagacattggcaataatgccagcgggccgtggcgggtaaagcgttcaaacgcgcggcctgcgggcatttccgacgtcgtaatattggcgatgacggcaatctgatgataatcctgctgctgccactgaatattgcaggcggcggccagtttggaatgagaaccgtcggcagcaaccaatagctcagccgtcagtcgctcgccgttatccagtatcacgctggcgtgttctaccgttctctgtacatccacaaccttagcggggcaatgaagggtaacgcccggagccttagccagcagcgaaaacagacgctcaccgacgtcgtgcaactcgataacgttacctaaagcgggaacccgatagtcatcggcacgcagattaacaaaaccggcgtggccagtatcgctgacctgcacgtgggttatcgcagtggcacaatccgctagcgcgggccaaatgccggttcgctccaactgctgacaagtgccttgcgacaaagcaatcgcccgcccatcaaagcccggatgggcgcgatcgccaggtgcagtcgcttccaccaaagcgacttcgacctgacctttggtcaatgccgaaatcgccagagccagcgtcgcgccggccataccaccgccaacaataatgatactcatcgcttactttgccgccgccattaaagcttcaatatcttctgctcgtttcactacgcttgccgtcaggttttcattgccggtttcggtaattacaatatcgtcttcgatacgcacgccgatccctcggtatttcacaggcacatcggcatctggcgcgatatacagacccggctcgatggttaataccattcccggctttagaatacgtccgcggtcgctggtttcataatcgcccacatcatgcacatccatccccagccaatgactgagaccatgcataaagaacggacgatgagcctgctcggcaaacagctgctctacatcgccttttagaatacccaaatcaaccagtccgctgatcatgattcgcaccacgctatcgttcacttcgcggatgctgatgcccggtttgaacagttccagcgcggtttcaatagactctagtactatgtcatatatcgcgcgctgtggcggagagaacttgccgttgaccgggaaagtgcgagtaatatcaccggcatagccctgatattcacagcctgcatcaatcagtactaaatccccgtcccgcagctcacattcattttcggtgtagtggagaatgcaggcattctcgccgccgccaacaatggtgttataggcagggaaacgcgcgccgtggcgggtgaactcatgcagaatttccccttccaactggtattcaaatattcccgggcggcatttttgcatcgcacgagtatgtgccaaggcgctgatttcgccggcgcgtcgcatcacttgaatttcttccggcgatttgaacaaacgcatttcatgtagccacgggcgccaatcggtcagcgttgccggagcgcgcagatttttacggaaaccattacgcaactgttccaatgcggcaaagacgattttgtccgcataggcgtattcgccctgagcgtgataaatcacatccaacccattgaataataggtgcagttgctcatcaatttcatcaaatggcaaggcacgatcgacgccgagttttgccagtgcagcatcctgccccaagcgacgaccaaaccagatttccgccgttaaatcccgcacccgattaaacaacacgctgtgattgtgggtttcatcgcttttcaccaaaatcagcaccgcttcaggttcgttaaaaccggttaggtagctgaaatcgctattctgacgataaggatattcggagtctgcgctgcgggtggcctccggcgcggagaaaataattgctgcactggctggcgccatcttcgccaacaatgcctggcggcgattttgatattcttgctgagtcattaccttctcctgaaatctattgtatcgagtttgagaaacgatcaattaatctgggaaaacctctcagcctgtcgcaataacacacgccaggcagcccgcagggcgaatggactgtgccacgcgccgcaaatccgctgttagtgcagagtcggtttcggcaactcgaccgccgtcggcttctgctgagtgaattctatatggcacagcaatgccgcaactcgaacatattcagcgacttcttctaaagactgagccagttcttcctgatcttcatcttcgtcgtagccaagctgggcgatattacgcaggtcgtcaatggcttcgcccacttcgtctttcacctgagccagtttaggctgaagcatacccaatcccagcaagaagtgattaacccaaccagataacgcatcggcgcgatcgaatacgctgatttcatcgccttccggcagcatcaactggaacataaagccttcgttttcaagcgcttcttgcgtagattcatgcaattgttgcagtggcagacttagcgcctgcgggaaagccacgccttcgttggtcagctcatgaactagcgcttgccagccattatcttgactgccgccacacagcatcccgctgatcaggccatgcatttcggcaggagtaagggcgatggcctgctggttcagcgcctgagcaagagattggtaagttggtaatgtattctgtatggacatgcgtattcatcatcgttggcaggataagttcgtgttatgctaccaccaagatcagtcgctataccagaaaacgcaacgctataaaggggttgtatcttggtatcgaggtatatatagtggcgcccgctttgaccactaagggcaatttgcttatggtgttacagggctagcgcggaaattagtcaggaaggtggcatgtctgcacaaccggtagatattcaaatttttggtcgctcgttaagagttaattgtccgccagaacaacaagatgcgttgaacatggcggcagaagatcttaaccaacggttgcaagatcttaaagttcgcactagagtcaccaatactgagcagttagtttttatcgcggcattgaacgtatgtcacgaactggctcaggaaagattgaaaacgcgtgactatgcatccaatatggagcaacgtattaggatgttacaacagaccattgaacaagcgttgcttgaacagggtcgcatctctgaacgtcaggatgcacaatttgaataaatcgttgttgaatgatagattcgacagtgagtaaagaatttctctgaggtgttcgccagcgggccagtcccctgagccgatatttaataccaacagaatgttgtgatccgtaaccggtgagcatgctcggtccgccgagaagccttaaggtagcgacactgcgttcaccttgaaccaagggttcaagggttacagcctgcggcggcatctcggagatccctttatcaatcatgatgttgtgagatcatggttattcgataagttcgattcaatacaggcagcctatgcctttcgatccccagcacggtcctttacggcaacaaatcagaaacgacatccgccaacggcgacgcttgttaactccggaacaacaatacaattctgcccggctcgccagccaacaaatccagcgtcatccccgaattcagcaagctcgcagcattgcgctatttctctctttcgacggtgaactcaatacccaacctattattcagttgctctggcagcagaaaaaacaggtgtatcttccggttttacacccgttcagccgcggcaatttattgtttttacgctacgcgccggaaacgccgttagtactgaatcggctaaaaattcgtgagccacagttggatgttaaagaggttttgccactttctgagttggatatcatcattacgccactggtggcgtttgatcgtcacggacaacgtttaggaatgggcggcggattttacgatagaactttacaatactggcaacacaatggcccctaccctatcgggctagctcatgactgccagttagtggacgatttacccgtggaacactgggatattccgctgccggaaattattacgccatctcaggtatggcgctggtagtgactgaattatttaaaatttatcggcatctgctgataccgataaattgaataaaccgccatttcatccaatagacttcgcctctacgacgcaaaagatgaagggtatcgatggttagtagagcaaacgggcgcgaatagtccccggaatcgccttcattaattgcagagccgtttcagccctatcggtgccctgagtttccacatcgatcaccacataaccaatttccgagctggtttgcaggtactgcgctgcaatgttgattccctgctcggcaaaaatctggttaatgctggtcagaatacccggacggttttcatgaatatgtagcaaacggctggcattgtcaccgtgagcaggcagggaaacctctgggaaattaaccgccgaaagcgtggagccgttatcggaatacttagccagtttccccgccacttcatcgccgatattctcttgcgcttcttgcgttgagccgccgatatgcggagtcagcagcacgttatcaaattcacacagcggtgaattaaacggatcgctgttggttgcaggttcggtcgggaatacatctattgccgcaccggcaatatgattgctagccaaggcatcacacagcgctggaatatcgaccacggtgccgcgagaagcgttgatcagcagcgcgccgggcttcattagcgctaattgctctgcgcccatcatattgcgggtcgagcgagtttccggcacgtgcaggctgaccacatcgctcatgttcagcaaatcagaaagatggcgaacctgttgagcattgcccagcggcagcttgttttcgatatcatagaaaaagactttcatacccaggctttcggccagaataccaagctgggtaccgatatgaccgtaaccaatgatacccagttttttgccacgcgcttcataggagccagcggccagtttgtgccattcgccgcggtgggctttggcgttagccgcaggaatgccacggaacatgagcaacagctcgcctaacaccatttcagcgacggagcgggtgttggagaacggcgcattgaataccggaatgccgcgtttggtcgccgcgtttaaatcaacctgattagtgccgatacagaaacagccaaccgcgaccaatttctctgccgcagcaaaaacttcttccgtcagatgagtacgcgatcttaaaccgataaagtgagcatcacgaatcgattctttcaatgattctgtgtctaaggcacctttatggtattcgatattgctatatccggccgcacgaagattatcaaccgtgctttggtgaaccccttctactaacagaaacttaattctgtctttttccagtgatacttttgccatttccccaaccctattttcagacttcagatgcggctgcctttgtctatgaatctggctagcacccagtcaacataacaaatattacggcggcatcaatacaaacgattgcctggggttcagcacaaatttcactcaggcaggagttttgcggaagaaaacactgtgtaacagcaagttaacggcaggttaatggaatagagaacatcaatgtgacatatgtcactaaatttaacctttttaagaaaagatgattaatcgcaaaaaatactcgggataacgcgaaaacgtcatcccgatgacctattttaaccagtaaggcttattgagcagtgattgttttcacgccatctgcggtaccgaccaaagccacgtctgcaccacggttagcaaacagacccacggtgaccacgccagcaataccgttgattttattttctaacgcaatggcatccagaatatccagattatgtacgtccaagattacgttgccattatccgtcacaacattctggcgatattccggcaagccgcccagtttgaccaactcgcgcgccacgtaagaacgagccattggaatcacttcaaccggtaaggggaatttccccaacacatcaacctgtttagacgcatctacgatacagataaatttacgcgcaatagctgcaatgattttttcgcgggtcagcgccgcgccaccgcctttaatcatctgcatatggccgttgatttcatccgcaccgtcaacgtagatgtccaggtcgtcaacttcattactatcaaaaacgtggatgcccagacttttcagttttgccgttgaagcgtcagaactggaaactgcacctttaatctgatgtttaatcgagcctaaggcatcgataaaatgtgccgcagttgagccggtgccgacgccaacgatggtgtctggtttgacataatccaatgctgcccaacccactgcttttttaagttcgtcctgagtcatggtcatttcactgcctattaataatatgaaaacctgtcgctattatagaacatgcgggagggaaatctcgccaattaagcctgactcagatggtattaatccactctggatcacagatatgttcccgcacaaccgctgaatttccgttgatttttgccgcagcaaaatagataaactgtggcatagtgccttattaaacttattttggagagattactccgatgaaacgcccagactaccgaacgctgcaagcgctggacgcggtgatccgtgaacgcggctttgagcgcgcggcacaaaaactttgcatcacccaatcggcggtatctcaacgtattaaacagttggaaaacctgttcggtcagccattattagtacgtaccgtgcctccacgcccaacggagcaggggcagcgtctgctggcgctcttgcatcaggttgaattgctggaagaagaatggctgggtaacgacaacaccgtggatacgccgctgctactgtctctggcggttaacgccgacagcttggcaacctggttgcttcctgcgctaaaaccggtactggcggattcgcctattcgattgaatttacaggtagaagatgaaacccgaacgcaggaacgtctgcgtcgcggcgaagtcgttggcgctgtgagtatccaaccgcagcctttaccaagctgtctggtggatcaattgggtgcgctggattacctgttcgttgcctcaaaaagctttgccgagcgttacttccccaacggcgtgactcgtccggcgttactcaaagcaccagcggtcgcctttgaccatctggacgatatgcatcaggcatttttacagcagaattttgatttatcgccgggtagcgtcccttgccacatcgttaattcttcggaagcctttgtacaactggcgcgccaaggcaccacctgttgtatgattccgcacttgcagattgagaaagagctggagtcgggagagcttatcgatctgacgccgggattattacagcgccggatgctgtactggcatcgctttgcgccagaaagccggacaatgcgaaaagtgactgacgccctgttatcacatgggcgtcaggtattacggcaggattagtttcgcggttttatttcgccggattcagttggaataccacgtcgacctgatcgtcaaagtgaatggtctgctgctcataagtttgggcagcatcgcttgccatgcccgcttccggacttttatacatgcgcgctaccggcatgggctggtagttggccacgcgataacgaatactgtacaccggccccagagtagctttaaagccctgagctagagaaccggcctgagaaatcgcgttatcgatggctttcttacgcgcctgctcacggtaagtctctggattcgctacccctaattcaacggcgcgaatttcattcaaacccgatttgagcgcgccgtccagcaactcgttcagtttatccaactgacgtagagtaacctgaacctggcgcaccgcccggtaacctttcagtactgcttcgccggttttcttgtagtcgtattccggctgagtacgcaaatttgccgcattgatatctttcttctcaataccatttttcttcagaaaatcaaaatattgagccacacgagtatcaacctgtttcttcgcttctgcggcgtctttggcggttacgctaacttcaatcgccaaagtggcaatatccggcgtagcgtcaacgctggcggttcctgaagtcacaacgtgcggcccttccggcagctcagcggcctgcgaagccaaaggtaacgttcctaatcccatcattgcggccaaagccaaggtctttaacttcacggtgcctcctaaaaatatgccgatacgaaaaatcgctgcgaagcacggtttatcagtcaattacacctaagagcaagcttcttttcagttaattactcttactgacgaccggaatcatgcacaattattttgtcgcttagttaattcagtaacctaacaaagctagcacatcttttgccatgaagaattcagaatagtgataaaaaatcaaaaactcaggccttgtttagccaactgaaaggcaataaaccacatcacaccgccgactaacaaattgatccctctttgcgccgctgggcgattgagccagggagccagccacgcggccagcaacgccaaggcaaaaaaccaactgatagaggcactgaccgctcctaaagcgaaccatggtctgacatctggcaataactgaccgcccagactgcccagcaccacaaaggtatccagataaacatgcggattgagccaggttacggccagcagagtaacgatgattttccagcgatttttcacactgctgccttcaatcgtatcctgaatatctccacgccatgcagcgcacagcgctccccagccataccacaacaggaaagccacgccgccccaagttaccagtgccaaaagcagcggcgattggttgagtaaggcactaccaccgaaaataccaccacaaatcaggatgatatcgctcagcgcgcagagcgcagcgctcataatgtggtgctggcgcttaattccctgattcatcacaaaagcattttgcggccccagcggtaaaatcatcgcggcgcttaaagcaaaaccctgaagaaaaatggctaacatgttgttccctttagataatatccgctaatgtgcgaaccgattgcgagcatattacggcgagatagtcatcagaggaaatggatatttcttatccatgataagacgtgctaataatcaacgcggaaataaataagataattgacgttaagaagttaagaagttaagaagttaagaagttaaaaataagccgcccaataaaaaacgggccattcggcccgctgagaagcatttattgccagaaaccgcacaattactccgccgcttttttctctacctgatgcagatgcacatccatttgcgggaaaggaataccgatattatgggcatccaaagcgcgtttgaagttctccagcagatcccaataaacctccaatgcatcgccattggtggtccaaacgcgaacggtgaaattcagggaagaagcggccatttcgtttaaacgaacgatcacgcctttatcatgcaggatacgcttatccccagcgataatatcgcccagcacttttttaactacgtcgatatcagcgtcataagccacgccaacggtaatatcggtgcggcgattaggttctcggctggtattaatgatgttgttggcaataattttaccattcggtactacgatgattttgtcatctacggtacgcagcgtggtagaaaaaatctgaacctgcaccaccgtaccggcgacgccgcctaaatcaacgtattcgccagcgcggaacggacggaaggcaaccagcagcaccccggccgcaaagttggacagcgagccttgcagcgccaaacctacggctaaaccggcggcaccgataacggcaatcactgaagcggtttgaacgcccagacgtcccaacacggcaacgatagtgaaggccagaatactgtaacgcaccatcgccgctaaaaagtcagcgacggtaatatcaataccacgcagacgcattacccggtttaccgcgccggaaaccactttggcgatgaccgaaccaacgatcaaaatcaataatgccgcaatcaggtttaccgcatattgaatcagcaaatcttgattgttcgtcaaccaggtgcttgcattattaatgccgtcaacgacgtttaactcttccatttttatcatcctacgaagttctcccaacctagagaaaattgcacaaaaacttccgccagccatcgaccggcatcgcatttaacccgttgagggtaacgaactatggacgcggttgccaactttgacagaaaaacaacaccaacagaatcagacttattacctaaaactcaccggataaaccgccatgattacggtatttctccgttggatacgctagaaaagaaaaaggctcctacaggagtattgtttttttgtttaataccatgaaataaaaggatttatttctttcaatgtccacacattgaccacatcaagttagagtcatactttaattacgacaaaacgcccgtatttgcgggcgtttttacttatcactatttcaggtgaaaaaattcagctaaaagcaggatttgaattcgataagtatttcatgctgtcagaacatcaacacttgcccgcctgcttgcgggtgaggcggtaccggatttatttcccctggcgtagaaatcgaacgcataaaactttccatcgtcacaaaggtatggccgcaattcacattggtgcactggtgatagcgttctttggtttcgatggtgatctggctgctgctgcgggtatgggctgcgctgtggcataaagggcaattgaacatgatccggactccggcatcatcccggctatggccggtgttaatgataattatgcgtgattgttgattcaaaatcatcattccatatccaaatcatctattttcacctctaattccagcgcggtagtaaagccgctgtcattcacggaatgagtgaccgtgaccaacgtccagtcggcgtcatctatctgttttttaaagccagtgactttaatcggcacttcggggtagagagcggctcgccccctggctaactgaatggagaacttggccgcgccgcgttgcagccgttcccaattggatttagccgctcgctgcgcattgtgtttgttggcgtaagtggtgcgcaaggtcagcacattctcatcagtgccgatcagatattcaccttgtttcgcttcgggttctttgggcttggcggtagtggtcgccttgcgtttacgctttcgttttaccttaaccactggtttttccgtggtacgggtattcaaccagttagccaccacgccggtataagcgccccggtcagccatactaaattgatggccgtcacccaaactgcggataatagtcatcactggaataggtttaccgctggcggttttcgcctgaccttgtttgataaataacagattgcccttttttacggcggcaatagccccgtattgttttgccagtcgggtaattaaattgccgtctgattcgttggtttggtctatatgttcgacgattaaatcagacatggccttatttaatgtgggtgtgagtttattgcgctcggcaattatcttcattatcccgccaatggtggttttatgataagactgatcgcggcgaatattgagcgtttcacgaaaatccgcactgcgggcgcgaatagtcagcttatccggtgcgccgctgtgctctatttcatccacggtaaaggtgcctttatcaatcaaggccgccccttgccagcctagcgcaagcgctattttagcccctcggcggggcagcactaactggccgtctgaatcatccagttcaatatcaagctggtcggcctcaaaaccgcgattatcggttagggttaatgacatcagtcgctttttaatgccgccgcttttatcgataccatccacggtaatagcataatccggcgcgttatgaccgctattggacaggatatcaatcatgataataacccgctggcggtgtcagagatttgcgcggcaatatcatcaaattgctgtgataaatcaccaaacatttcttttaaggattcatcagtgcgttttagcgtcagcgtgaattcaatcttgcgcgctgaaccatcactgaaaaagatacttttggtacggctaagattctcaatcacaaacatgccgtgaatggcaccgttcccctcaatcagtgaccaggctttgccggtttcagccatcaactgcaaggccatgagcgaggctttaccgccagtcagttcagggtatagcacaccggataaggttatcgattcttcatctggccccaaaaactgactgattggccgcaagccgatgcgggcatttgtcgggtgacgccatgccatttgatgctgaaaatcttgataggggacggtttgcaacataaagacaaacatccctaatgccatcatcataagtcgctccttaatcaatatcccgataactgctgttcatttttgccctggcgctgcgctcaagggcgctcaactggcgggcaatttcccgcgcaatatctattggagaatcattgggttgggcgataacctgaatgggtgcattgatatgcaccggcgtttctttgattatcgtcgtgtgagtctggtgggtggctcccgcctgagtcggcggcaggctatagggatgcatcggcgcggcagccgcctctccgccgctgaacatcagagcggcagcggttgccatcgtcgcggtgtttctgcggctggtgacattcaccgggccactgacaatctccggcccatactctcccactacgccaaattttcccaatgggatacgtccgcccgcgtcatgctcgccggtaaatcttttgcgaatagcctcggcgctgtgaccgattggcgtcggggcaaacgtgacaccggcggcctgagcggcagcggcaacccccggatgggttgctgccagcgctttggttttctccgaccgttcccgcacctcatccagtttttttagtacccattggatagagtcggtcagggccttcatcggggtcagcgccagatggataccgtccgccagaaattggccgaatgctttaccggcatcagcggctccgtttaaatcgcgcgtggtggattgcaccggttccagtagtttcttgaaccagccccagacctttttcaccccgttggcgatccactcaaaaacgggggccagtggcttgaaggcttctttaatcggcgcggcagcttgccgaaatccgtcaacaacgcctctcagaaatgccttaatcggttgccagtattggtaaatcagcaagccaacgccggcgattgccataccaatcaaaccaattggactgagtaaaacacccaaaacactggatacgctgaccagggcgaaacgcaggaatttaagcggggattttgccagccaggcgaggccgcgaccgagcattttaaatgccccaatacccgactgaaccggtgatttcgccacattaaccagcgcaccgcccagacttttgagggattgcaccccgttttttccggcatggcgcgacatggacaatatcgactggccgaaattgccaaattggcgggcggtgatcggggtggtgctggcgagacgggacatgcccgcagacaaattgggcaataagcgaatacccaacacgcgggtactgaaacgcagcaaggccagcggccccaaaatccccactacggcaatcgccagtgccccaaaagcggttgttgttatcgcgatagcggcaccaatctttacaacggcttggctgatttgcgggtgtgctttgaggaattcggccacgccgtgcataaattcgctgatgccttttgccgcagagcgcagccagtcgttatttttctcgaacagctcaacgctgatattttccatggccgcgtgcaatatggtcatatcaccggtcaggttatccagcatggtggaggaaacccgttttgcctcgccgtcatactcgcccggctggccgcgcattttcccaagagaaccattaccggcagcatgcattagcacaccgaacccagtcactgcatattgcccggcgatatctttaaaaatagcaccgcgctcaacgttgcccatcttgccggttttctcattgatatctttgaggatatccactaaatcacgcatattgccgttcttgtccgaggttttcacccccagatcggacacggccttggagccaccaatacggcttaaaatactgcgcatggtagtaccagcctgactgccctgaataccggcgctgccgagcattgccgtggaagccgcgacggtctccagactctgcccgtactcccggccaacacccgcagagtatttcagcgactctcccagcatcggaatgtccacgttatttcgggtaaataacgcggtgaggacgtcagcaacgtgatccatcttctcggcggggatccccatcgctgtttgaatgttagaggcgatatcggcggtggtgcctaaatcaatatccccggcggcggccagatttaacatgcccggcatcgcgcccaaaacctgcttaggtgaataaccggtacgaccaagaaaatattggccctgcgcgacttccagatcggtaaatttggaggacagcggcaacgttcgggcctgctggcgcatggcctgcatatcggctgagttcttatcggggatgcgggtcaccgcctgagttttactcatcatggcgtcaaagtcataacccacatgcaacgctccggcgatccctcttcccatcgctttacccgttgccatggaggtatagcctaatccggccgccaaggctttgcgctgattgctggcatcaaaatgattacgagcctgattaagccgttgttgttgctgagcctgttgctccagacgccgctgttggctgactagcgcggcagtggtgctggaaatattggcttttaagctgcgctgggcgtcacccagtcggtgagtggcaataccgctattttgcagggcgctacgctgatgatgcaaagaggtccgcaactcgctgtatttctgtttaagtttactggcttcctgtctggccttttgaaactggcgggcctgtttggcggtggtgcccccggaatttctcgccgcgatatcatactggcgtactttttcgcgggctgccgccagcgcctgagccgcaccgataacggcggctttagtctgacgaaatccctcaatactggccgactggttattcagctgctttaactggtctttggtggctttaatggcgacggccagcgttttattgctggcctgaatggatttaaacgggcgggtaactttatcgactgcgctaagtagaatctgcaagcgaaggtttttatcactcatcactgcctccgttgcggatcacggctttatgtcgccatgctaataattcacctaatgacatgggatcggtgacggtgggcggccagtgaaaaatgaccgcgatatccgccgtcaggtcgtctaccgtcaggctgtcaggaaatcggatttgaccgaattcggtaagaaaaaaagcgccacggcgttcgccaactgatacatatccgccggatcgaggttgctcacttcctgcgtggtcagatttggcgtggtgacgcggggcagcaccttaatcagcgaatctacatcggtatccagtagtgcctgaagtttggctccgcgcagtgccccggcattgggtttattaaccgtgacctcggtaatggtggtattgccacgcacaataggtacatccagtgtaatggtgttgaactggtctaaatcagtgagggtttcgtcggtcacttctgggggtgtcacagtttttttcatggtcatcatccaaaggaaaaagggaatagcggcgcgggttaacgtgccagaaaattacaggccgatattgcgacggtgggcttcgagcctatcttcgccgttgaccatttcgaccatattcacggtatcgatctcgatcagcacttcgccgtcccacgtcaatttgtagtagacgcatttggtggcgatttttaccgtggagctatcgccctgtttgctgtcgccggggtcgatttcctcatgacggcctcgcaccaccacttctaccgcgtgggtttcgccggtgtcgtcccgttggtaggaaccgacaaagcgcagcatcacgccgtcaactttggtcacgccccattgtttgtaaacctcggcatcgataccgcccagcgtccagtccacattcagggcatcatcggccagccccaaatccaccttggcgctgccgttcatgccgccaccgcgataatcttcaaatttgcggcccagcttgggcaaagtaagtgattcgatcacgccctgatagctgttcccggcgttgaataaattcaggtatttcagtttgcgtggtaaggccataatgtcggttccttagctgttaacagattgggcgaagttggccagatagcgatcggtgatgcgctggcgcagcatcaaatcttccagcgggggtactggcgtgtagtcgtaatcaataaacaggcgacccgctttgagggtgtctttgctgttgacgtcctcgtcataccagcaatcgccatcgatgatgtaaccctgtgatttcagctcgcgcattttggcgcggataccttcaataatgtctttggccatcgaaggattgagcgcgccatcaatggcccacatctgcgcgtcggccatcgtatcggccatcacctgcgcggtacgggtgtagttttcaaaggcaaacagcggatcatctgagcaactacgggaaccccagaagcggtaaccgtctttgcgcactaaggtagtgatgtcgtggctgttgagcaggtcagcatcggtggccgtgttctgtaaatcccaaaacacgtcggcgctaataccggtgacgccgttcacaccgacgttagacagggttttatgccagccggtttgctggtcaattttggcgcgtaagcctagggcgcgggcagtggcgtaagccgtggtttcgccattcgtgacgctatcccaactgaggaaatccggccagatcagcatggcttcacgctggctgaaattctcccggtacttcatcgcgtcttccatggtcttgcagccgtgggcgctgatataagcgaaagctcgcagattctgcgcgacggataataattcggtggataccgctagggtgtcatgaccgggtacacccaagatgcgtggctgtacgccgagttttccctgagcggctaacagggctttcatgccagttttgcggccgtcgggtgtggctccaccgataatattggaggtggtttcggcttcagtttcgccctgagccacgcgaacaaccacggtcagcggacgggtttggtcactgatggcatccagcgaacgggctaaggtgccggtttcgcccgctttgccgctggcggccagcacatcggtgagcaaaacgggggtattcaggggaaaggctttggcgtcggcatcatcggaggtacagaccattccgaccaccgccgtgctgacggtgcgaattgggcgagtgccttcgttaatttcaatcacgcgcgcgccatgatgataatcggttgacatggtttttctccggttaagcgttcaggcgctatgatgccggattgttgagcacggagcaggtgatgggtgttgtgtgggagatggcacaagagaggaatagaaaaccccggccagcggggctaaaaatcagtcttccggcaccaagaccgggataatatcgcgttacccctcaacataaatacataccctattacgattgcctctctgccccaaccagtatcgccgaaacctcattagacagcgtagtcatatccgccagtacgccggtgacgccctccggcttgaccatgtacggcagtaccagactgccattttttaccgcgctatcaacgcttgccagtgtatccgcgacgggctgcgccgccgctttaatgtccgcaagggttttggcctgtgcgatagacaccgcaagctgtgagacattcaccagtatcaggctcagcacatcagccaaaacgccctcccgcgaacgggtatccgctatcgtctcaatctgctgacgtaccaacattcgcacccgcaccgcgtcctgagactccagcccccggctggtaacgacataaccgccgctgcgatcagagtgcggcatcatttctttattgcttaacgtattcatttttacacctttattgtgttctgatggcttcgccgaggccgagattaaacagttgcggacaacgatggtcagggttccatctgcccgggatgatctgcggtaaggcaagataaagtacatctcccaccgcaggattacccgctaccccaatatccacatggctgtagttcccggcagcattaccactgaataagtgatgagtatgttggtgccaacggcctttaacctcgttgtggcaccaagaccagtcagcgccaccgataatcttgtaatacagcacaaaactcataaaacagccggtcggaatatgctggcttggaatatggaaagcgtaagggccaaatccgtcgatagtctttttgatggtgactttcataatgttgaatgcaccgtgaaaatggagcctatccattcccatgtactgcaataattcgcgcacaatcggcgcacgggtttccggcgctaccccagaagcgacggggatcatttcaatgtcgaacttatcccagaaatgaccgccggcatgtaatcccatacccaccggcaactgttgcggcggtattccggccaaatcgttcagggcggcgtttttattaacggccaaggctgaatgctcgtgtacctgcacatactggtcatgagggttagtgctgcgaacgtgatcggataatgccgtgacggaagcattagccgcagccttaaccgctctcggcgtcgccgcctcggtttcactgttgctgtcggtggcattgctcagggtgacaaagcctttctcgcttaacgtcgcatcgggatgattgcgggatttggcatggtcggccagcacgttatccgcgtactgcttaacctcaatcaccttatcatcgacatatttccgcgtcgccagtaccaccgacgggtcgattttcaatgtcaccgcttcggtgctgctgacaatcaaaatcatccgaatggtttgagtgcggccactgccttcctgtagttgcggtttgtaggtttcggcgcagttggcaatggcgaccaaatccccggcactgtcgtacaggccgatttcacggatccaccaaccgccctcattctctgggataacctgctcggcaataatctggctggtattgacagggtcaatgctcaaggcattcagcgctgcccggcgtttctcgccgataagctgggtttgtgctggattgggtgcgggtaaagcaccgcctccgtcgcccacggccatttgggtgatgtctaatcgggtgccgagcgcggtggcgttcgccagtttggccgccccgacgtgggtcagaagtgcatagaatctagcggtcatggttcacgctcatctcatcaatcatatgaatggtgccgccggtgtattcgctgccggtgacggtgataacttcgggtaaataggggtaaacggtcagctcgtcgccgctgtaacaacccgcgccaacgtaaaactggccgctgctgtccagatttatcgacaggccaatcaggtgacggctggccggtttggcgtcgtcaatcaggcgctccagttcgcggtacatttcttcggtaataccggtttccagcacgccgacatcaaggcgaaaagtgccggggatgtcgccggttttccaccactccagcaccttaatcagatagcccagcggctcgaccacgcgacggatagcgctgatggtgcctttgtgtttgtgaacgtaaaacgaggcgcgcaccacgctgcgcttggtcgcttccggccagctctcatcccagcgatccaccgaccacgcccaggctaaataaggcaataacggcagcgggcaggtgtcgggatcccatagctggcgcagtggcaccggcacatcggcaatcaccgtgcaggctgcggcggcggcgatttccagaggcgaggaaccggcaggcaataggcggttattcatccgacccgccgatcgccaaggtgtagccggtgcagtaggcggcctgagttttatccagcaccacatcggccagcggtgcggccagttcgacccgctgcacaccttccacatgcagggcggcatagatggccgataaacgaatatcacggcctaaacggtgctgggcgttgacgtaggcggccagtttgtcggcggcggcacggcgaatgggttcggcttccggccccggaaacagatagagtctggcgtcaatctggtaatcgacaatcacagcggattgcaccgtcacccggtcagccactggccgtacattctcatcgtttaacgccgcatccactttggcgagcagttctgccgacgccacgccgttgttttcgcgcgataataccgtgacagtcacgcaggccggggacggactcagcgccgaggcatcggctacccgaccgtcggcgctgcgggcgtgaaactcataggccccggtcggcccagccacgctcagaccttcaaaggcttgcgggatgcgcacccgaaaatcggcgtcggattccatcacggcggccaatggcggaatggcggttaaatctgccggggtgataagcaggcgctcgacgccattattggcacctaactgatcgaggtcgctgccattggcgtaagccaccatcaccgcctgcgcagcttcgttgactcgctggcgtagcagcaattctaaataagcgctttcctgcaatagcttaacgatgggttcggattcaaaggacaacgtcacccgcactgccgcctgttgttcagtaggataaagtgcaataaaggccgctttgcgctgattaagtaacgcttcaaattccagtgattccaccacctgcggcgcgggcagcagacttaaatcaatggtcgccattattgcccccttaacgggatagagagactgaggcgttcggcgctatccgagcggttgccgaacagttccaccgtcatttttccgctgttttcagtcgtgagatcaatcgccgtcagcgtcacgcggggttcccagcgcatgactgcgccatacaccgccgccatcattttgagccgtaaggcggggttctgcggctgatcaatcagcgtggacagcagcgaaccgtattcccgacgcatcactctggagccttgcggcgtgattaaaatatcgctgatagactggcgaatgtgagccatatcggtaatggctttgcctgtctgcgcattcatgccgagataagtcattgcggccccccggaggaatcaccgccacctttgacgccgccgtgttgatgggtgtgaaccacaataccgtttgaggtcagattgccaccggaatggttaaagtggcctcgcgcctcgccgccttcttcaatcagaagggttcgggtaatcaggtgttgagtacatttcaccactggcgtggtgagggtgatcgaggtttcggccacgatattggcggttttcatgccggtaatggctaaatgacgggttgcaggttcatattcaaatctggccccatcgggaaaagtcactacgatggcatccgctgaagccgagggtgccggattgctatcggaaaacaccgcgggcaacacaaaagcggtggtgagttcgccgccgatactgaggataatcacctgttcccccaccgagggcgcagcccaaaagcgcacccgaccggcgcggggcgtcagccagttcaaccagtcggtttctagctcgcccatttttacccgacataaacctttgaccgtatccacttcggatacaatgccgatgcggatcagattcgccagggcgcgtttaagtgctgcaataagcgttttcattcagccagtatgccgcgtgcgggcgcgactggcatgtgataggggttgtgtgagggatggcacaaagaattaactgcaaaaagaataaacgcgtgtattaaaggttaatcaaaatgtgaacaatatgggggttcggtaatacatcaggtgcatctaatgactaaaccctgtaacctccctacgttttattattttaaagggactttaaatggctaattcaatttatttgacattgcaagggactaagcaaggtttaatatccgcaggttgtggctcattagattctattgggaatcagtatcagtcaatgcatcaagatcaaatttttgtttactccttacaacacatgatatctcgcgctcaaaactccaatcatcatccgatagtttttagaaaaccgatcgacaaatcatcgcctttgctgggattatctatttccgagaacgagagtcttcactgtactttcgatttttatcgaacaaataacgcgggttctcaggagaagtattacaccatcgaattgactaatgcggcactaacaaatatccatgttgattatcctcactcactgacccatgcaggtatgcaaccggaagaacatgtatcagttcgctatgaaagtattatctggcagcatcatgttgccggtacatcagcatatagcatttggaatgaccgcgttttataaggattatcttgtggatgagattaataccatatccaacaaaatcgtagcgtcctttgaacctgatggtgtccctgaaagcatatgggctggggttatgtcagtcccgcaggatatctattatctgacgcgtggcgttatggatacagaacaccgaagccaaaattccaatcactttcaccggttggcaacttttataaaaaatggagatattgatagtgcaatagtaagactggttgaaacaattgccagagactttatcgataggcttcccgaagataaaaaagacgcgctgttaaatagcatttatgcgaaagttggctcccgctttggtacaacaactacactcatgtatttgttaacttcacgaatgaatagatcaatagcaatgcaccctaaattaaaagcatctttgggtatttttcggggcgcggcgataaactccatattgaccgcaggtgcattggcaaaccactcagcttatgactccagagagctgagagaacaaaacccaagattatattggcgtttacgttctatgggcgaactggacatattgtattttttaattaaagattcagtgtctggctatgtggaggccagcggtatgcaagagcagggacgagatgatgaatacaggaggataatagataatgtcatcaaccaactcaacggttaaaaaaatcttagtcggttttctatattatctttcttatatggcggcaaataccgttgctatgatcgcaatagtattgatggttacatcatttttctattttgaacattggtatgtcgccatattagcttgcgtgggtatttttgcggtttaccactttatattgtatttattcccgcaaagaccagattaataactacttcgcaatatgccccaacgccagatccccaatccactctacatcgccgtcggttagccctagcaactggcggcgttcatattttaccgttggcccgttgcggctgattttatcccgcaggccgtagtgatggactctgaccatatgattaacctgcccgctaaaggtcactgccgcctcgtccgccgtggcttcggttttcataaaacgggcggtgcgcaagcgggtaaacattttgcgcttaatccgcccccgtttgtcgcggcgttttttcttacgcggtaagaacggtgagccgtccgggttctgctgggcctgaatatgctgttgctgtttttcccgcagttgtttggcaacctggcgggtaaaccgggtgcgcccctgtggggaaagttgagccagtaaaatagacagcgtgttatccagctcatgaaaatcactcatcgtgcccactccgcgaccttttcgccctgaatataaatctggtaactatccagcaacgcataaggctctggcggttcatccagatgggtgacgtttaacgcgccgttttcttctttgactatcacccgctcggtgagtttcaactcaatgctgatatccctgacagttttatcaataaaatcaatctcgaaggtaaaaccgtcctgacgcttatcctggctggccatcatgcccggttggtgtttgcgcagccagtgtaagatcgtcaccatcagcaaatccatgtcatggccataatcagtcatcaccagattaagggtgtagcgatattcaaaagacagcgacggggccagcgtggaaacaatcgctccgcgatcgataaacacatgcaggcagtcggggttttgtctgacgtaggcgctggctttcatcaccgcgtcccgcagggagtcaggttttagcatgttattgctccagtttacgtaaaggtttcaggcaaatagtgcgaatatagccctgtaaaccggctatttgctggtcggcggtggcgatgcgttgccggagatcgaaataatgccgttcagcggcgtcagtaagtcggggccgggcagcatcagccacgctgggggcgcgggcggttcgctggctatcgggcaagggacaggcggtgttaaactgcaagcgctgagtaccagcggccacagcacggcgcaaatcgtcaatggtggcttgggcatgagccagttcctcggtgtgttgtttatccagtgcggcgacctgttgttgttgttgccgctgtctggcaatggcgcgattggccgttttcagcgcttgctggttttggcgggcgctatcacgccagctttcggcttgccgctggtagtgtcgggccgtcagagctgaaccacccaatgccagcaataacaccaggccaatcaacaatgttaatcggttaggcatagttcgcgctccgcttcccgccgctccggctgaccggcgcagttattcgcccggatacggcaatctttgccaccgtcaaaaatccatttgctgatttcgtgacaggcacccacgcgatccccggcattcatcttgcggaaaaaggtcgaatgacggcattttccgataccaatgttgtaggcgcaaaagctggccactccggctttttgcggatcactgagcggcaccgtgatgtagcgttcgaccaacgccagtgctttctgagcttcagccagattaaaacggtcacactgcgcagcggtcaatgtcatccccatcacaaccggctttccgtcgataaccgtcaacccccggcaaatcgtgggtgatccgctgccatcccggtaagcattcaggcggttgccttctttctcatccagaaactgagagaaaatcaccaccgaactggctccggccaggatcagcccctgaacggctttactcagtcggctcatgattggctccctgaataagctgttgtcgtttgatttcatagattgcttgctggcgtatatcttcccgccgcttgtaataacggttagtcagataagtgccgacgcccagcaaaataccgataaaggtggcccagtcttgcagcgtccaggcaccaaataaggtcagcacccaggcggccagaaaagaggcccatgacgtgtgtttatccactgttttctccctgggcgcggcgctaatcccaaagttgtaaaagttgtgaggtcgccgctggcgtgatatccggcatcgtgaccgggtagccgtggggcaaaatcggccctctgtctgccaatcccggattcgcggctaacacctgctcggtgacaccggcagtccgcccgtaatagcgccaacacagggcgtctaccgtgtcattttgctgagccagaatgcgcatcagatcaattcgcaggtcatacgattgatagcctgaatatcgttaatcgcccaggccgcatcacggcgcagcgcatcaatggtggtttccagtgaatcggcccgtttactgccggagccggtggcgtcgatactgcgaaaacgctcggttaaactggcctgcatcaggcaatacaccgctcggcggtaaagttggacattgacgctttccccgtctaactggctggccggaacggtcgtcaggctaaaataaccctgtttctgccgggcgcgttgccagtcagccaaacgccgattcgtttcgtggatggcaaaacgtgcagcctcaatcactcgcggctggctcaaagtgccgtcctgtcgcatatcatcccggtatttgttcaggtcgatatccggccagaactcggtgtttttaatcatcgtctggccgctatcactgacgggggatttatccctgtccgggctgggctggagcacaacgttcattgtgatgttctcaagtaagtgggcggtggacggcaaccttgtcagagtaaaaatattctgactcggctaccgtgccgcccccgccgtggcgtttgggttacgcagcctggatcagtttctcaagctgcttgatgtctgtttttacgccgctgttttcatccagccgtagcgcttcgttcaggtttgccagggcgagtacgttgtccccgtcctgccgcaaggcgtagccgacaaacttatgcagccgggctttcaccgcatcgggcatatcccgcccggttaatagttcccgcgcccgcatcagttgggcggtatccagcggcgctttatcggtcaggtcacgttgtgctgcggttgtcagcagctcggccaccagacaggcggtggtgcggctgaaatcttccggcgtcaccaaatcatggcgtaaggcgtattcagcaatatccagcccgctggcaatatcgcccacgtccatatgccaaatcagcatgcgcattaacaccgcgtcctgtccgccatgacctttcgccagcacaccggcgacccacggttgataggtcggcaacatgcgccgcttcacctcggctttacccagatgagactccaccttgtgaagctggcccatatcctgccgcagcttgaacagcagcagatcgtaagtgctggcgtggttcaggctggcggcttcgctcaacgaatcagactgttgagccgccacaaatagccggtgccgacgggcggggttggtcatgatggattactcccccgttggtgcgtctggaatgaccggcgcggagaaatcaccgagctgaatgttttcaatcagcgcaacacagccgaaatcttcaatcacataggcttcattgaccgattcgaagttttccacccggtcacgtttcgggttgtcgataatggcgcggcggcgggtgccgtcttgccagtaaatagacaggttatccaaacgggtgatcagaatggtgtcgggcgggaagtgtggtgcgcgcacagccggtaaaccgccaatacgtttctgactgataatcaggtctgcggccatcgtttcgctgttgggctggatctggttaacgatcgggaaatacttgtcggccagcagggaacggccgcaaatagccaccagttcggtgtcgtcctggaaccagctttcaaccagctcattgacggctgacatcaccagcgcatccatgttgttatagtcaccgcctttaccgatgcggattttagccgataccactttgccgtcctcatccacaattttatccatcacatgctccggcgcatcttcccggacggcctgcaaccagccacggttaacgtcttgcaataagggattttcggttggatctgaggttttcgctcgcgctttgccgttaaagccgatcatgatgcggtcgagtgcctggcgtttaacgatagagtcgcggatacggatttggaagtcggggaacttggcccacatatccagcttggcgtaaggcaaggcggtatcaaagttagtctggccgcacttgtagccattgctatcaagactggttggatcggtcggttcacgctctttttcatgggtattggtggtgctggcaatcgggcgctcaatacctaaaccgattttatcgccttccttttcatccaccggataaacgttgattttggacagaaaggtgctgctttcctgttgtttggtttccagcttctgcgccaccgaaggctcaacggtaaatttggcctcgacgtcagtcacatcactcaacgcattcagagcagccacttgctggacgaactgcttatatttactgcgggtcgtatttttcatgggaaattaactccttaacaatcggtcagcagggcgttttcgttacccgtcgccgcaggtcgctggctaaattggcgatcggttttgccgagttgggttttcagttcggtcagtgcctgttgggtggcggcatggtcagctttcaacgcggtgaaagcggtttccagtgtgctcaacgccgtgagtttttcttccagttgctgcgccactaattccaccgcctgatgcacatcactgaagcgagcgtcatccgtggtctgttttttggtgaacatggctttgatttggctaaacagcgccggtttctgctcggtttcagtctcgaattccagcgtgatttcatcggccacgctgaaaatggcgtcggcctggcttttacgtgaagccaacgggttattggcgctttgggcgcagaaggtcaggatttccgcccccagtgacgccggggtatcggtaaaggcgatgccggtcagataggctttgccggtgtctgcgaatttctccacgtactcaatgctggagtacaccttctggcgggactcgcgcagcttgaccaaatcgtccgtcgcatccacttgcaccagtagcgccaatttgcccttaagtgggccgtctttgatttcttcatatttggcggcggtaatatcgccgtaagcgcggaatgggctgtcgggcagcacacttttaatgtgctccagattggcgcgggcgccgcgaaacgtcgggttatagctttcagccatttcaacaatgtgctgacggggaataaggcgcccgtcgctggttgcaccctcgacaacggcgcggaaaaacttggatttaggcatggcatgaattccggtttgggatggtatggccttatgttggcaaccggcgtcaaacggaacaatgaagcgctgttgtgtcagggctggcacaaggcgtaatacgagatggaggcgtagcggataggtagccttgcggcatgaaaggttactgcacaggcagattgaatatggatagtgtcactatcaatgccgatttagatccccgccgtcaagccaagtatctgtactggcaagggctgaggattgcccgcattgcggagatgatcggtgagaaggctgtcacggtacacagttggaagcgccgcgacaagtgggacgattacggcccattggatcagatgcaactgaccacggcagcggagtattgccgattggtcatgaagccggtgaaagaggcaaaagactacaaagaaatcgacttgttggcgcgtcaggccgaacggcacgcccgtatcggtaaatataacaacggtggcaatgaggcggtgctcaatcccaatcttgaaaaccgtaacagtgggccacgcaaggcagcggaaaagaacagctttagcccggagcaggccagcaagctgaaagatatttttcttgaatccatgtttgactatcagcgtggctggtatcaggccggtttatcgaaagagtttcgtatccgcaacctgctcaaatcccgccagattggggcaacctacttcttcgcctgggaagccttgctggatgccatcgaaaccggccgcaatcagatgtttgtttccgcctccaaagcccaggcgcaccaatttaaaaactacatcgtagccgccgcccgtcaggtagaggtagacctgcgcggggaagtgattattttgcctaacggagcagaaatgcacttcttaggcaccaactccagcaccgcccaggggcgtccgggcaatctgtatctggatgagtatttttggatacccggcttcagtaaattgcgccgcgccgcttccggtatggcttcacagaagaaataccgctcgacctatttctccacgccctccaccaccactcacgaagcctataaattctggaatggcaccctgtttaacaaagggaaagcccgagaccggcagcgggaaattgacgtgacctattcccgcctcgccgggggcaagctgtgtgaggataaacagtaccggcagatcgtcaatattgaagacgccgaacgcggcggctgcaatctgtttgatattgatgagctacgtaatgaaaacagtgatgaagattttgacaacctgttcatgtgcaactttatcgacgataccgcctcggtattttccatgcaggaaatgcagcgctgcatggtggatagctgggaagtgtggaaagacgtaggtttgttatccctgcgcccctttggtgagcgtccggtatggattggttacgacccggccagcaccggcgacagtgccgggtgcgcggtagttgcgccgccattggtgccgggcggtaaattccgcgtactggagcgccaccagtggaaaggaatggatttcgcggtgcaggcggccaatatcaaggcgctgaccgatcgctataacgtgacctatatcggcattgatgataccggactgggccgatccgtcacccagctagtgcgccagttcttcccggcggttcgcgccattcactacagcgtcgagatgaaaaccgacctgatttataaagccaaaaacgtcattaccaccgggcggctggagtttgacgccggttgtctggatatcgctaccgcttttatgtctgtgcgcaaagccatgacacccagcggcaggcaggccacctatgtgaccgatcgggctgaaggcaccagccacggcgatgtagcctgggccattatgcacactctgtttaatgaacccctcgaagggattaacggtaataacaccagtatcatggagatattttaatgcgtcagcgcaaccgcaataagcaatcagggcaagctactgccgcacgaggacagaacgacggccagcgagccgaggcgtttacttttggcgatcccattccgatgctggatcagcgggatattctggattatctggaatgttcgcaggtcgatcgctggtacgagccgccggtgtcttttaatggtctggcgaaatctttccgcgccgccgttcaccacagttcgcctatctacatgaagcgcaatgtgctggttagtctgtttgagccgcacccgctgttatccaaacaggattttagccgctacgcgctggattttttggtgtttgccaattcatttttggaagcccgctataaccggctgggcggattaatgaaactcacacccagcccagctaaatacacccgccggggtctggacactgacacttattggtatgtgcaatcctggacggaaccgtaccagtttgagccgggtcatgtgtttcatctgcttgacccggatattaatcaggaaatttacggcgtgccggaatatctggcctcgttaaattcgacctggcttaatgaggccgccaccttattccgccgcaaatattatctgaacggcagtcacgccggttttattctgtatatgaacgatgccgcccataaacaggaggatatcgacaagctgcgcaacgccctgaaagaatccaaagggccgggaaacttccgcaatctgtttatgtatgcgcctgccggtaaaaaagacggtttgcaggttatcccactcgccgaagtcgcggccaaagacgaatttatgaatattaaaaacgtcacccgcgacgaccagctcgccgcccagcgtgtgccaccgcagctcatgggtatcctccccaacaataccggcggattcggcgacgtagaaaaagccgcgcgggtatttgccatcaacgaactggctccgctacaggagcggctcagtgaactcaatgagtgggttggggaggaggtgataaggtttaggccttatgagttgttggtttaactatttccagtaggattactatcaccatgtggggctggttctataggtgtgaataaaatagaactggctttgctgtttttattaaaatgctcaacaaattccttgcagttatgtatgcaaacaaatgacgccacacatctaaaaacaaacaacatgcttagccccataatacatatgtttattataatttttagcagattaagtatatgttctgaggatttcaggttaattccagagacactgggcattgtattttcagtaatatcaagaaacaagaagccccacaatgaaacaagtgataaataacatataaacaatagtgcttgccataagattctttttataaaactatcaaatttctttgcgaatctggcgacgcctaagtcatctatataacaagtattgacgaagcgcttactattttcaaatagaaatatagagtacccagagttattcgagcgtaatagaagatctatctctcggtagccaacattcatacatttagttttatagaaaaatactctttcaactaaatatctgcttccgtgacttttatttttataagcattaatcaaatcctcatcaaacttatacttgtctcgaaaaatgctacggcggtatgcaaggaaagaaactaaagttgttaataataccccaatgaaactatatgtataatctggcatgacttaaagctcacttatattcaacgtgatatatttacaatatgcaatcattcaatatttaactatattgtgattgctataaatccttcggtgaccaataatttatagataagtcacaacacattttatattcctatcgtgacatgtcacaagcctcttgattttgtttttgtgccgtgtcacgattttaaaagagcaagccgcaacggtcagcgtaggattaactgataattgctcaaatcattacccaaataccccacaacaacactgcaagcctatagcgcaacaatccgcataactctattcactacccaatcaccctgaaaaccacaccaggcaaggcctcccctcacttttcgaaatgcataaaaagcgaatttttagtcatgcaaagcgggggcgagggggtgacgcggaaagagggcttgccgctgtactttcatatccgcaatgcccgcagaaatacccaccagaaagccagtgcttaccaccgccttctctgcatcaaaacgacacgatccgacggacaacaaaaaagtgcctgacagcgtgggctgtaggcgctctggtggctggctttcttgcggtcaatttatctcaccacatgtacgccattcatttttatgcatattcattcattttgatagccagctaactcccttcgtgctatcgtaaaagcatccgcgctacaggctggataacatcagatgtttatacccctttgtctgccaacattccgaatcgccctgcaagcaacacccgtctttctcgcccggtaaagtatccccgcagcgcttacaactacttttcttcagttcggccagttgcttgtgcaatagcttattgtcctggcgaatcaagccaatcagatattcggtaatgtcgtaaggctggcgagctatgcggcgctgctcgcatccctccagcagcatagccaactcctgcgcatccaaacgcagggtaacggtagttattcctaacgctttatcgcgcagacgctgtgcgcgtttgcggtcgcttgctgtagtcattttttctatcctttcacaacacgaaagccgactaagagcgaattatcatcataatccgcccctaccacgccaccctcaaccagcgcattaataacgccgatcatgccgactcgtatcaccccatctattttgccgcacatagccgtactgtcagtggcgaatcggttggagcaagccacacgaatagccgccaaggttgtaatagcatctggatcaagaattaataattcgttaagaatatcaacagctttatttgcattaatcattttcaatctccacgttataacaaataatcatcctggtgcactgccattaactccgacagaatagccaggcgttcggatgcaggtactcattaggtgttcaacaccaatggatttatctatatcggataactaaccatcacccagccaccggcccaaaccacaccggtttatcttggttatcttctgcctctacggtttccaacttacgtttatgctcaccaaccaagcggataaccagcggcacctgttgctcgcgtagccgctcaaatctggctttaatatccgtcgccgaagtcgtcaaattgcgaacgacatacagtgcgccgtccgttctcgcccgataagtcgtaccttcaaccgtaaccgatgctccttttgctatggatttcagcatgttgttatccagagcaataccgatggaatcagcgaaatctttgattaaaaactctttctcgcccagatctgcggccagcatcaattcgccctggctcggctggcggggtttagtgggctttttccgaggttttgcggcttcgcagcgtatccgattaagcatttgccgccgctctttagccgttaatgcatcaaaatcgatgttttcaggcggtggcggcggctcaatgaccaccggtggtgtggtcattttttgtacccccgtacagttattgacagaactccgagagggcgcgggcgcgcccttaacgtcaacagccaaatcaacggcgcgggcggagacaatcgtccagacagttgtacgcgtgatgatgggggtgtctctgccaacgatgggcgaaaacaatcccttgatgcggatcacattttcaaaatagccgttagtcgcttcggtgacttcgtaataggtacgcacaatcaaatcatcgcggcgaacgaatggcccaccttgggcattaacatacccggcccaattaccgttatcagccgcatcatgggcggcggcaaactcaacgctcaaccccacagcctgatcgtgatcggccattcggcgtaattcgcggtaaaccgtcaccggcgcaccaccgataaattgaaactggcggatacgccaacgacttgcccaggcagataccgccggagcaacttcttttagcaacttgccggtatcgtcatcgatttcaccgtccagcgcgtagccgtcgatattcttcgaaatatatttcgcgatataaccggtcgcgctacccttctctggatcgatagcttcggcatgaaaacgggcctttcgggttttttcgctattcagctcgtcgatattttcctcatgagcatgattgcggaaaatcacccgagcctgttcgatatgctccgggcgcataaacagcaacatatgccagtgcggtgtgccatcgtgatgaggttcagccacgcgaataccaaacacgcgaatatcttcccgatgcaattttgcccttacccggctccataccccgcgcaaataacgttgggttctggctgggcttgcaccattccacttacggttacggtgaccgtccttattggtggcatgaaatttagaaggtgcagtcagagtgtaaaattcccctgcgtagcccaactcttcacaaatattttcaaatccgcgaatacgaaccattagctcacagcggcgaattgccgggttagccacactgtgatcgtatttctcgatcagggaaaaacgattcccttgctcgtcctccagttccattgatttaagaaactctcgggtacgccgcttctgctcccgccaatccccaacggtggcagtactggcataaggcgtggtttttttactgacattgccgagggcaatatgtaaatgctctttccacatatctgcatggcggcgcaatcggcgcttccaccaatcctcggatatcatgcgagccacaaatgaagtcaggttttttacgttcagtttccagcgcgccgttagatagatttcccaaccgggaggcgtctgcttaaaagcctgagtcattgctgcggcacgacgataaagggcaaaaaccaccgtaaaatcagacttgccgtcaacttcatcatttatcacgcctaactcacggcgtaattgcagagaaatatctttcgccagcaaatcaatatccgcccgaccggcatccggtagatggctaaaacgggtagcaagtggggctgtgtcgttagcttcggcagatatttgatattgatcacgaaccagatccagacgtggcaatacgcgctcaacaaagtttttcgttaagtgcgtattggctcggcggatgccctggttttgctccagtttattgaggtgcaaacggatgccgcgctgaacaatatgcggctgtttagcaaggagatcttgggcatgaattaatgccgcccgttgttggtctgtctgctcctggttttggggctgtaaataaaccggcccaccaattgcagggcgcggagcattccagggataggcccactcaaatggcactacgccgctacatggaaaaggtaacggcggtgtaggtgcaatgcggccgcgtgagtctcggctcaatccacggcctccagcgtagcaataatctcctgcactttctgacggccatcgcctttgcaactgatagagcgcggcgcggtaatactgtggacggcgaaaagagcgtaaagctcggcagcgcggggagtgtcgctattggaaaccaccaccttgcaaccgttatcagcggtatttaccagcgccaaagctaggcggcgctgatcgtcatcggtaaaaccatcagtgtgatagtgggtaaaatcggccgttttagacgttgggatatacggtggatcgcaataaaccacatcgcctgggactgtcatatttagcgtctcggaaaagtcgcagcataggaacgtggcgttcttggccttttctgcaaagaaacggatctcagcttcggggaagtaaggcgctttatatttaccgtaaggaacattaaaaccgccgctttggttatagcggcacataccattaaaacaatggcgattgagatacagaaatattaccgctctgctgagtgcgtcactgttgccggtattaaaaacattgcggaattcataatattgctcggcggtgttagccgtcataaacaaggacgaggccaggttgattagctcgctcggttctcgtttggcgatgttgtaaaagttaatcaggtcagcattaatatccgttatcaaatattcgtcataatccgtattcagcatgaccgaacaggaaccggcgaacggctcaaccagccgcttaccagcaggtaaatgctggcgcagggtttccataatacgggccttggaaccggcccatttaagcggggagcgatttaattgcattgagcaccgcccgccatagcacgaataatacccaacgtggttttacagtcggaaagcgcacgatgagcagtaccctcaataacaacgccttgctgtttggcggcgttacccagtctctgccatttgtatttatttctcttcttatccctttcgccgaaatattcggcataagcttccatgacgcattcagcttcaagaatatatttcttacctaaaaactgacaattattagctgccgccgtttgaaaaattaaacgggtgtcaaatagcgcattataaataagtagggtacggtcattggtcagcaccataaattgccaatgaatatcacgccatgtcggggcggctgcaaccatttcattcgtgatcccatgaatggcggtggcctcggcggggatagtttttattggcttaacaagcgtatccagcaggatcttaccggtacaatcaataatagttatttctactatttcagcatcatcccctagccctgtagtctctgtatctagaataagacagttattttttagccactttttggctcgatgctgtgcgcctaatttacacagtctattacccagccccttaatccattgacggatggcgcggaaaagtgctttaaatgaatcgcgagcacccatgattttttgaactgatttaatgtcatttttcattatttatttccactcaagatagctgcattggcgttacaagaagagaggttgtcaggaagagcaaaagacagcattaccaacccctgaattgcaaaatcagcttcggtaatatcggtggtcaacaccttaatttcacgccctgtaaattcatccgctccgccatcccattcctttaacagcaaataatcaccaacacggaaaccccggtcatctattcgtagttccgcttttttctttccttcgataactgcatggaaatattcgggcaatattttcaattcatgcgttcttggcgcgtaggtatatgcggtcaccgcctcctgaaatgccgttgcagtgcgtattgcttctttgcgtccagactctgttttatttattgctttaagcgcgttagcggttgtgccgaataaaccagcggtaacgatgtttttacctgcatcagtacccgcaatcgcaaaaatcaatgaatcccatagcggttcaaatgctgaatggaaatactccaaatacccaacgcgctgatttaactgctttatcttctgttgctgactgctttcaatacagctaaggcgctctatttctgatgcggcagaggttaagtggcctatagcgtgttttgccatagcagataacaacggatgcaactcatgaggaaatgattgaattgcattgattacgcaggtaattcctttaattgaatcgatggttttggtattagtcataatttcagcctcgtttttaggtaataaaaagcccgacgcaataaagcgcctgtaaatttcaggtgttaatcaggttcgatttaaatcaggtaataggatcgcaatctatataagtgattctttccggtaataaactggctgacgctcgccagcggtttaaggcatcgacaatatttctttgttcgtctggtcgtaaatctgaaaatttattgttatgtctggctctctctatgcctgccagataataaatagcacctttcatcttcgggtctgtctcacccatttcagtaataagcgcgggaataagccctttatgttttggattagggaataagcaccaaatttcagcagtatgtttaaggccgttctgacgttcttctaatgtcagcggtaaagcccgtacctgttcggtgttagccataaccaatccttacgtgaaaatacccattaaacgagcaaaccaacggcgctttgctccgggcttggcaataaatggtgtgcggcaacctttaacgaactgcatttcgctggctttgggttgtgacttcgatgggttttggtataacaccgcaattacactgagtgaccagcaattccaacgcctgagcgctagtttggtctccagatgattgtgcggtacttaacagcccctccaagccgacactcaggcgaaaggcgtaatcattaagcgaaaacattcgcacctcgtcggcaacagcggaagcgatacgcaggttttcggccttgaagtggtattgctgcaacaactcattgatcaatatgaaataggcttgcttcatttcttatcctttaaagttgctggtacgttttgcgttcggtttcttttttgttgattatgcggctacggtgatcgtgaataaccgcacgggctgaaagaaaggcaatccaaacgagtgctgccaataaggctattgctccgctggttaattcggctaattggccgggcatgtctcgacctcatcgttaaatggttgcggggcaatgccggacgttttgaattcttgcagggccgcactgagctgatgaaaagcgtttaattcagagccgcataactgccaggctatcgttgtgatcatggttaatcctgcaatggcattacaggtgataacttctttttcacgtgcacgaagatgaggattaaacgagaaagcttcgcctttatctgatgcacagagatttaactcagctatttcagccgtgtaggttcgtaatatggcgttagccaccggtaagcaaatggatttcatgctgcggctcccgttgtgcgttggctatacaaccagtcaatgtattgagtcgccagagattgtgagtagaaatagccaaacgactgatcgcccaacagcacctcatgccgcgcaattgggttaattgccgtactgcggcgataagcgagcacaaacgagcgataaccttttgagtttttgctgattgggattatggcgtagctcatattggctctcccagccctaaccacatcaaccacccgtcacgaatttctttaggacggctatcaaaagctaacttcattcccttgttccaggctggcaaataaacccatgattcggcgcgtgctgcagggttctctgggtttttcatttccacgacgggcaacttacctttctcaatcatacccttcaccgcttccggtgatttgccgatcaatcgagcaaattccgggtaactaatggcatctgacatgcttacgatttctttgctcatctgctaacctctacgattgtgcaattaattgcttatagttgcttttagttgcctatggtggcgacaagtacgccttacgatagtgccaatattatacgatggtataaacatgtcaatagacgtatcagagaaagtaaagctaattagagagtcagaaaggataaacagaaaagaattcagtgagttaactggtgttaactatgcgactttgtctagctatgaaaatggtgctaagggaatgagcttagaaatgacaatgaggatcttgaatcatccccgatttaaaaaatacacactctggtttatgaccgatcagattgcccctgaatccgggcaaattgcaccggctctcgcacactatgggcgagacagcgaaacctctccgcaatcggaaaatggggctggctaactctttataagatattcattttcgaagataaatttcaaaacgactactacatcggggagttttcttatgtcgattaagaagctcgatgatggtcaatatattgtggacattaggccggctggtcgcgacggaaagcggattaggcggacattcagtaaaaagcacgaagcactggcgtttgagaaatatgtggttgttaattaccacgaaaaggattggctatctaaacctgcagataagcggcctctttcagaactgactgcattgtggtggctatatcatggtcagagcatggattatgggaagaaatataaagcccagttggcaaaggtcgccaagattatggccgatccctgcgcttttcagattgataaaagcgccattgccaaataccgagcgataagacttgcggagggcgtaaaggcatccagcgttaacagagatttgattgttttgggaggaatgtttactgcgctgattaatgcggggatgtatcacggcgaacatcctttgagagggatcggtaaattaaaagccaagcaaacagcaatggccttcctatcgcagggggaaattgcgttattgctcgaccgactgaatgaagataatcgtcggattgctgttttatgtctgagtactggggcgcgctggggagaggctacgcgcttgagggcggagcatgtagtaaataatcgagtgacgtttgttgagacgaaaaatggcaaatcacgctctgttcctatatcgcaggacgtagctgacaatctgatttcaaaaaaatcaggcttgctgttcggcgaagcggcatacccgatcttttgccaagaactccggtcagtgaaggtagacttgccgcacggccaggcaacgcatgttttacgtcatacctttgcgacacattttatgatgaatggcgggaacattattacgctacagcgaatattaggtcactcgacaattcagcagacaatggcatatgcgcatttttcacccgactacttgcaggatgctatttcgttcaatccattaagaggaaaagcaacgatttagtgtccacggattgtccacacttgggtcgcttttagatgcttttagaggcttgtagtgctggctaaatgattgattccccgtaccacaccagtgggacggggatatcataaggctcctacaggagcctttaagcaaatacaaacggaacgctattacagtacgtcgaccgcgttcagttctttgaatgccagttccagacgagtaatcattgaagtctgggcagcacggagccatacgcgtggatcgtagtatttcttgttaggtttgtctgcgccttctgggttacccagctgagcttgcagatagccttcgttctttttgtaatactgcaggataccgtcccatgttgcccactgggtatcggtatcgatgttcattttcactacgccgtagctgaccgcttctttgatttcttctgcagtagaacctgaaccgccgtggaatacgaagtccaggctgttgtgtggcaggccatgttttttagaaacataatcctgagaatcacgcagaatagttggggtcagtttaacgttgcctggcttgtaaacaccgtgaacgttgccgaaagaggcagcgatggtgaagcgtgggctgattgcgttcagtttttcgtaagcgtaatcaacgtcttctggctgagtgtacagagcagaagcatccatgtgactgttgtccacaccgtcttcttcaccgccggtacaacccagttcgatttccagagtcataccgattttcgccatgcgagtcaggtatttgctacagatttcgatgttttcttccagagactcttcagacaggtcgatcatatgagaagagaacagtggtttgccggtagccgcgaagtgtttctcacccgcgtccaataggccgtctaaccatggcagcaatttcttggcacagtggtcggtatgcagaatcacaggaacgccgtaatgctcagccatctgatgtacatggtgtgcaccagagattgcgcccagaattgcagcaccttgtggaacatcagttttcacgcctttacccgcgatgaacgcagcgccgccgttagagaactgaacgataactggtgcacgcactttcgccgctgtttccagcacggcgttaatggagtcagtacccacgcagtttactgctggcagagcaaagttgttttctttagctactgcgaacactttctgcacgtcatcacctgtgatgacacctggttttacgaaatcaaaaattttagacatgttacgttgtcctgtttcgtcggccgaagataaatggaatcggtttcgctgattaacctgtcggcggctaccgacagcagcgaaatagcgaaacgggcggctttcgccccccgtcatctaaattactgcttagcgcgctcttccagcatcactactgctggcagttttttgccctccacgaattcgaggaatgcaccaccgccggtagagatgtaagagatttggtcagcaataccgaacagatcgattgctgccagagtgtcgccaccgccagcgatagagaatgcttcgctctcagcgatggcgcgagccacgatctcggttcctttacggaagttagggaactcgaacacgccaaccggaccattccacagaatggttttggcgtttttcagaatctcggccagacgttcagcggacacgtcgcccagatccaggatttgttcatcgtctttgatttcagttgctggtttcagcgtcgcggtcgcagtttcagagaactcggtcgctacgcgtacatcggtaggaaccgggatattgcaggtttccaacagacgtttggcttctgggatcaaatcagcttcgtacagggatttacctacgttgttgccttgagcagccacgaaggtgttcgcgataccgccacccacaatcagctggtcagcaattttagacagcgcgcccaatacagtcagtttggtagaaactttagaaccgccaacgatagccaccatcggacgagctgggttacccagcgctttacccagtgcttccagttcagctgacagcagcggaccggcacaggcgataggcgcaaatttaccaacgccgtgagtagaagcctgtgcacggtgagcggtgccgaaggcatccatcacgtaaacgtcacacagggcggcgtattttttagacagggtttcgtcgtctttcttctcgcctttgttaaagcgaacgttttccagaaccaccagctcaccggcagccacttcaacgccatccaggtaatctttagccaaacgtaccggagaagacaatttgtctttcaggtagttaactaccggcaacagagagaactcttcgttgtactcgccttcggtcggacgacccaggtgagaggtaaccattactttagcgccttgcttcagcgccgcttcgatagtcggcagggatgcacggatacgcgcatcggaagtcactttgccatcttttaccggaacattgagatccgcacggatcagcacgcgtttgccagctagatccagatcggtcatcttaattacagacatggtgaatcctctcgttgattctctttaaagttgcttatcagtaggtcaactcagggtaatcccttgaattaacccgccgtattagaaaccgctgtcggccattgccaatgtcgtatccaacattctattggcaaagccccattcgttatcgcaccacaccagagtcttaatcaggtgctgcccactgacccgtgtttgggtgccatcaacgatagcactgtgcggatcgtggttaaaatcggtcgacaccaatggtaattccgtatagtcaactataccacgaaatgaacccattgccgccttttgcaaaagctggttgacctcagtcaccttcaccgaactgctcacactgacgctcagatcgatcgccgttacgttgatcgtcggcactcgcaccgatatcgcttcaaacctgtcgcagaacttcggaaaaatacgggtaatgcccgcagccagcttggtatcaaccggaataatcgattgactggcggctcgggtgcgccgtaaatcctgatgataggcatcaataaccggctgatcgttcatcgaagaatggatggtagtgacagtgccggattcgatgccgtaagcctcgtccaacagtttaataacgggaatgatacagttggtagtgcaagacgcgttggaaacaatccgatgctctgcgcgcagatcctgatggtttacaccatagaccacggtggcatccaaatcatggctacccggatgagcaaacagtacctttttggcaccagaggccaaatgcgcctcgccatcttctcgggaaccgtacacgccgctgcaatccaaaactacatcgactcccagctcatgccaaggtaactgcgctatttctggctgatgtaccagccggataacatcgtccccaacgtagagcttgtcacattcctgacgaacatcccaagcgaaacggccatggctggaatcatatttaagcagatgagccatgccttccgcgtttgccagttcattaatggcaaccactgaaatttctgcccgacggcccgactcatacagcgcacgcaatacactacgaccaatacgcccaaagccatttatcgctatgcggattgtcatgttactccctgttttatggttatcttcatgcaaccccatagagtactgtagcacgtggcctgatattcatcgttttatcacatttcagataatcatgctgtcggcattatgcaaattattcccgacaggccttgataatgaatcacaactgaaacgcttcagccagaataaaccaaacgaggtacaaagggaatatcttgctgataaagggcacatatccccccttttctggcgaaaaacaggcaaaaaaaaggccgcagaagcgaccttttaacatcgatattaccgagggataccttcccttttacaccttgagaacagcgtctgttatttcaacagcgcctgagctttcgctactacgttctcaacggtgaagccgaactctttaaacagcagatctgctggagcagattccccgaagctggtcataccaacgacagcgccgttcaggccgacgtatttgtaccagtaatccgcaataccggcttctaccgcaacgcgagcgctaaccgccgctggcaggacagattcacggtaagccgcgtcttgcttatcaaacgcatcggtagatggcatagaaacaacgcgaactttacggcctgcggcagtcagttgatccgctgcggcaaccgccagttcaacttcagaaccggtcgcgatgaagataagttcaggctgaccagcgcagtctttcaggatataaccacctttggcgatgttagccaactgtgctgcatcacgcggctgctgagccaggttttgacgggagaagatcagtgcgcttgggccgtctttacgctccagagcgtactgccaggctaccgctgactcgacctgatcgcatggacgccatgtgctcatgtttggcgttacgcgcaggcttgccatttgctcaaccggctgatgggtcgggccgtcttcacccagaccgatagagtcatgggtataaacgaagatgctgcggattttcatcagagcagccatgcgcactgcgttacgtgcgtattccacgaacatcaggaaagttgcgccgtaagggataaagccgccgtgcagagcaataccgttcatgatggcggacataccgaattcgcgcacaccgtaatggatgtagttaccggcgatatcatcgttcagagccttagagccagaccacatggtcaagttacttggtgccaggtcagcagagccgcccaggaactcaggtaacactttaccgaaagcttcaagcgcattttgtgatgctttacggctagcgatattggctgggtttgcctgcaattgctcgatgaatttcttggattcagtttcccagttagctggcagctcaccgcttacgcgacgtttgaactcggcagccagttctgggtaggctttctcataggccgcaaacttctcgttccaggcagcctctttcgctttgcccgcctctttagcatcccaggccgcgtagatatcttgtggaatttcaaaggcagggtatttccagcccagcgcgtcacgagttgcagccacttccgcagcgcccaaaggcgcgccgtgggaatcatgggtgcccgctttgtttggtgaaccgaaaccgataacggttttgcacatcaacaatgaaggcttatcggtaactttacgtgcttcttcgattgccgctttgatggagtcagggttatgaccgtctacatgacgaaccacatgccagccgtaagcttcgaaacgcgctgcggtatcatcggtgaaccagccttcaacatgaccatcaatggagatgccgttgtcatcgtagaatgcagtcagtttgcccaatttcatggtgccggccagagagcacacttcgtgagaaatgccttccatcatgcagccgtcacccataaaggcgtaggtgtggtggtcaacaatatcgtgacctgggcggttgaactgcgcgcctagagtacgttcggcaatggcaaaaccaacggcgttagcaataccctgacccagagggccggtcgtggtttctacaccttcggtgtagccatattccgggtggcccggagttttagaatgtaactgacggaagtttttcagctcttccatcggcaagtcgtaaccggtgaggtgcaacaagctgtagatcaacatggagccgtggccgttagacagcacaaagcggtcgcggtcagcccagtgtgggttagttggattatggttcaggtaatcacgccacaggacttcggcaatatctgccatacccataggggctccggggtggccggaattcgctttctgcacggcgtccatgctaagggcgcggatcgcgttggcaagctctttacgagaggtcatgttttactccaggtcggatttaaaaagcgttcaagtctatcattttctcagactagacattgaaacggcaatcactaaaaacaaatgaaggcaacttccatgacggcacagccgaatttgctggattttcagaataaagctatagctctatcgctgattgcacgttaccttcgctaccttcaggtagctatatcaagcgtcagtattgcgagctagggtagtggaagccgcactgatgcaacagctattaatgcaattgctgtaatgtagcaatgaacccagattaattgaactgtctaactatattgattgaaacgtaaaactatattgattgaaactgaattgattagaacggattaaaccttaaaaattattgaacggcaaaaccatgctgaacagcataataatgcataactacaggaaataaggcgttatgaacattcgtacttcgttgatggctttgagtatcaccgcgctgctaagtgggtgtcagaatatgaacaccgaaggcctgatgcaatctggcgcacaggcgtttcaggctgcaacgctaagtgataccgatgtcagaacgctcagcgataaatcctgtgcagaaatggatcaaaaggcgcaaatcgcgccagctgacagcgaatacagcaagcgtctggcaaaaatttccgcagccctcggcgacaatatcaatggaacaccagccaactataaggtttatgtgaccaaagacgtcaatgcctgggcgatggcgaacggttgtattcgcgtatacagcggcctgatggatatgatgactgacaacgaagtggaaggggttttgggccacgaaatgggccacgtcgctttagggcatacccgtaaagccatgcaggttgcttatggcaccatcgccctgcgtaccgcagcgtcttccgctggcggtattgccacttccctgtctcagtcccaacttgcggatattggagaaaaactggtgaacgcccagttctcgcagaaacaagaaagtgaagccgatgattattcctttgaactgctgaaaaaacgcggtatcgatccgaacggtttggtcaccagtttcgaaaaactggcaaaaatggaaggtgggcgaggcagcagcctgtttgacgatcacccggcttctcaggcacgcgccgatcatattcgtgagcgtattaccagcggccagtaagctaattggtatcaatcatttctactacgcccgtaaatcgcgggcgttttttcttctttcaattttcatcgactggtttatatcaactaacttttatcgattaattttcatcgatttccacctgaatctgcccaccgtcaatccgcaccggataagtttgtagatcgcgatctcccggctcacgtagacatttcccgcttctcacgtcaaacaccgccccgtgtaacaggcactcaatagtgccctcatcaaaaaatcccggactgagtaacgcatttgcgtgagggcaaatatcatccatcgcaaaatattcgccatcaataatataaatcccaattcgtttatcccccacgctggcggagaacggcgaatctggtttgacgtaagacactttgcacacattcagccagctcatgttatcgctccatttattctcaggaagcccatttcaaggggtacagttcggcttatcgatcttagtgtggtcgattttgcgcataacggaggaaaatggttgttcgcagcagagaatagatatggaggggaaacaataagggcagaccgaagtctgcccttaagataatgcctgacaagccagttaactgggactcaccttcaagaattactcgtcttcgagataagtgtagccatacagaccggattcaaactcttccaggaactgggcttgcagttctggggccaaatcggtttctttgacctgatcgcggaagtgattcagcagtttttccgggtctagctgcacgtaagccagcatatctgccacggtgtcgccttcgtcggtttgttccacgttcacggtgccatcaggataaacatagacatcaactgcggccgtatcaccgaacaggttgtgcatgttgcccagaatttcctgataagcgcccaccataaagaagcccagcgctggcgggttttccggatcgtacggaggcattggcaacgtggtagccacaccgtcgccgtccacgtaatgatcgatagtaccgtctgaatcacaggtgatatccagcaacaccgcacgacgctccggtggcttatccaaaccttctagcggcagaaccgggaacagttgatcaataccccaggcgtctggcatcgactggaacagcgagaagttgacgtacagtttgtccgccatacgttcttgcagctcgtcgataatcggacggtgtgcgcgattgctcggatccaactgttcctgaatcatattgcagatagtcaggtactgttgttcagcccaggcgcgctgcgtcagatccagcatgccgtgcgcgtattgggtatgcacatcgtgcaaatccatctggctatcgtgcagccattcacgcagagaacgacggctttctggtttctgcatttcctgccaagtatcccacaggctttccagtgcgcgtggcgcatcttcggccggtgcctgaggttcactgaattcattgcgttccacgccgataacgttggaaaccagcacggtatgatgcgcggtaaccgcacgaccagactcagtaatcaccgttggatgcggcaaaccgtgttcattacaggcatcgccgataccccaaatcacgttgttggcgtattcgttcaaaccgtagttcacagagcaatcggactgagaacgcgttccttcgtaatccacgcccaaaccgccgcccacatcgaagcactggatgtttacgcccagcttatgcagttcgacgtagaagcgagcagattcacgcacgccggttgagatatcgcggatattggaaagctgcgaccccaaatggaagtgcaacagttgcaggctatccagactgttagcttcacgcagcatttctaccagttgcagaacctgagttgcggataaaccgaatttggatttctcaccgccgctggcctgccatttacctgacccctgagacgccagacgagcgcgaacacctaggcgcggcaccacgtccagacgtgctgcttcttccagtaccattttgatttctgacatcttttcgatgaccagatacactttatggcccagtttttcgccggtcagtgccagacggatatattcacggtctttgtaaccattacagacaatcacggagcgagtcatgccagcgtgagccagtaccgccatcatttctgctttggagccggcttccagacccaaaggttcaccggaattcaccagcgattctatcacccggcggtgctggttaaccttaatcgggtaaaccaggaagtagttgccttgatagccaaattcgttacgcgcacgctcaaacgctgcgttaatggaacgcaggcggtgctgtaaaatctgtgggaaacagaacaaagccggtaaacgctgcccgcgctgttcttgcatatccttgaccagttgcgccagatcgacacgtgcctgggggacgtccggatcagggcaaacgctgatatggcctaattcattgacgtcaaagtagttcccgccccagtaggcgacgttataagtgcgcagcatcttgctggcattacgatcattcatggcaacctcctgcatggagcgtaaagaaacatgtgcgcccgcagtagacggacggccaatcaagttatcatcagacataattcgcctctattgcgatactgacgataaagtcagtcactatcgcagctacaacctgcaaggacaacccgtgtgcgcaccctttaggaggaataatacgctaataaagcgccgcacgaccgcgagttatcactcagataattgtaaaacacgtttaaatgtaaaatacgtttaacgacacatacgtattgagatttcgtgaatcggatgcagcccaaatctgaaaaacagacggctggcgaaccggattcagtacttcaggcgaccgttaacctgcccgcgaatcctgagtggcacccatatgggtgtaacatcgggttgatggtatacaagaaaggaaggttgcaaggggggattgaacgtcagaacgacgcagctgttgatgtgcagcaaccagtagacaacggatcattaatccaaccacctccacgcatgtcgttcacgattgaacgaacaagacttattaataaacaagataaagtaacagtttgatgacgccgctgataatgccaatgtcgctgacaggattttcaccgccaactctcgccattaaacaatgagccaatgccattctatgccatcttcatcattgcgtatcaaataagctgcgcgcgcagtttatacctagaacagagagaaaatgcaaaatgaaaatggccgaacaactgtttcaataggtaaaaaatttgccgccaaagctcactaagcgttatctgatgttaaaaagggctggtaatgaagctgaaaggtgacctaaaatagacgtccagatgttaatccgtccatactacaaatatggaataggattataggccgctacaggctctgtttttttaatgactgcttgaggctttgcctaaggggggcgttacaggacgccagagtcaggaagcgagcgtattgatatgcaccaccgactcgcccctcaatgctatgcagtgatttttcatccgaataccaaggtaaagaataaaatggctaaacaccttttcacatcagaatccgtctccgaaggacatcctgataaaattgccgaccagatttccgacgccgtacttgacgcaattctggagcaagatcctaaggcgcgagtcgcctgtgagacctatgtcaaaaccggcatggtcatggttggtggtgaaatcaccaccagcgcatgggtagatattgaagaaattacgcgtaataccatccgtgagattggttacgttaattccgaaatgggttttgatgcgaattcttgtgccgttctgagcgctatcggtaagcaatcccctgatatcaatcagggcgttgaccgtgccgatccgttggagcaaggcgctggcgatcagggcctgatgtttggctacgccagtaacgaaaccgatgtactgatgccagcacctattacttacgcgcaccgtttggttcagcgtcagtctgaagtgcgtaaaaacggtacgctgccttggctgcgtccagatgcaaaaagccaggtgactttccaatacgaagacaacaaaattgtcggaattgatgcggttgtcctgtctactcagcattctgaagacatcgcgcaaaaagacctgcaagaagcggttatggaagaaatcatcaagccggttctccctgctgaatggctttctgcgaataccaaattcttcatcaacccaaccggccgttttgtcatcggtggcccaatgggcgactgcggtctgaccggtcgtaaaattatcgttgatacttacggcggcatggctcgtcacggtggcggtgcattctctggtaaagatccgtccaaagttgaccgttcagcggcatacgctgcgcgttatgtagcgaaaaacatcgttgctgccggcctggccgatcgctgcgaaattcaggtttcttacgctatcggcgtagcagaaccgacttccatcatggtggaaacctttggtacagagaaagtggctccagagcaactgactctgctggttcgcgagttcttcgacctgcgtccatacggcctgattaagatgctggatctgctgaaaccaatctaccgtgaaaccgcatcctatggtcactttggccgtgagcacttcccttgggaagcgaccgacaaagccgaactgctgcgtgatgcggctggcctgaaataagtttcagacctttcgcgcatcaagttaaaaccccggtttccggggttttttatgcctgacgatgggctctgactcgttcagtcaggctaaaaatcatcattcccaccaccatcgccaatgcgaagatcatgccctttcccacaccggcaccgactaataccagcgcagggccagggcaaatacccgctaatccccaaccaaccccaaatagcaggctgccaccaatcaagcgccgatcgatttgcgttgccgtcggcaactgcatcgggagccccaacagacttacagagcgcttacgagtcaggaaaaaggctaatgtgcctaccagaatggctccggccatcaccagccctaaagacggatcccacaggccgctaatatcgagaaaaccaagcactttagccggatttgccatacctgcgacaatcagtcccagcccaaaaatcagtccggccaatagagaaaagaactgtttcattttcctgccttatctataccaatacgtggcgaattagccacaccgtgaaaaaaccgcccagcatgaaactcaaggtcgccgccagcgaacgcagggaaaaacgcgataagccacagacgccatggccgctggtgcagcccgaaccatagcgggtgccgataccaaccaataaccccgcggctaccagtgttccgatatcggcatcaatccgaatcgctggcaaaggtaaaaacaaggcataaactaacggggaagcaatcaggccaatcaggaacgccaatcgccaactgatatccccctttttccctgctaataagccgccaaaaataccactgatccccgtaatttttccgttgaatacccaaaataacgccacggagcagcctaatattattcctcccgccgcagccgaatacggtgtaaaattcatccaatcaatgttcatgaatcccctctccttcttttggacagtaaagctcatatagcgtgtgtaaaatcgccagaatccgtcgatctgcgatggagtaataaatacgtttcccttcccttcgcgtcgtcaccagcccttcgtttctcaaagccccaagctgctgggaaagggtcggttgatgaatattcagcaaggtttccagctcaccgacggatttttccccctgactgatttggcacagcaataacaaacggtcttcatttgccagcatacgcaaggtaccgcaggcttcagccgctcccatgctcatcagattcagactcaatgtgtctttgctactcatgttacgccctgcaatttcgccattcattatataaaaacatataatataattatataatgtgtaattcgtgcgctcaaggctgaacgggtcgcttgcatctgcgtttccgtcacactattcttccgctctatgagctcacaaagaattcctatcgccctgcaacaaggggttatgcagtgtctacgccagaagctgcaacttgccaaccagcatctgggaacccaacatccagagccaaaaatcaactattaccaacgcggtactagcgccggtagcgcttacctacaatcctgggaaattcgcctgaatccggtattactgttggaaaacaaacagacatttatcgacgaagtggtgcctcatgaactggctcacttactggtatttcgtcggtttggccgcgttgcgccacacggtaaagagtggcgctggatgatggaaagcgtgctgcaagtccccgccagccgcacgcataagtttgaaatcgcctcggtgcagagcaaaaccttcccctatcgctgtgcctgccaactgcaccaactgacggtgcgccgccacaatcgggtgctacgcggagagagtgaatatcgctgccgtcactgcggtgaaaaactgcaatatacgactacagaaacatcttagttattggattaactgtataaaaaaccagatctttgtttgcctgagccgataactttctataacctgcgttcttttccatatttaggtcgttttggaacatgttacgcaaaattctattggttctggtttgctcttccccgctattctcatccgtcagttatagccaaaatatcaacaacttctcgcatgccaaagccgcagctgccaagatccatcaagacgctcccggtagtttttactgtggctgccagattcagtggcaaggcaaaaaagggcttcccgatctaaacagctgcggctatcaggtacgaaaaaacgcacaacgggccgagcgtatcgagtgggaacatgtggttccggcctggcaatttgggcaccagcgtcaatgctggcaaaatggcggccgtaaaaactgcaataaagatgcagtctatcgtcaaattgaaaccgacctgcacaatttgcagccagccattggcgaagtgaatggagaccggaataacttcatgtacagtcaatggaaaggcggcgaaggtcaatatggtcaatgtgcgatgaaggttgatttcaagaataagcaggcagaaccaccggcgcgtgcgcgcggtgctattgcccgtacctacttctatatgcgcgatcaatatcagcttcgcctgtccagccagcagaccaggctgtttgaggtttgggatcgccaatatccggttgataattgggaatgcctgcgtgacgagcgtattgcaaaagtacagggcaatcataacccttatgtacaacaagcttgccagcggcaaaaaagctaacctactatattggctgatatccccattggccgatatccccgccactctgttattctgcgggcagccttttatttcgcgtcgttaaccaacgaacggcgcggtgaaattttcgttacggaaacaagagcaaatccatgcgtatacctcgcatttatcatcagcagccgctgtcggctcattctgaactggctctcagcgatgacgccgccaatcacgtaggccgcgtgttacgcatgagcgaagggcaaaacctgcagcttttcgacggtagcaatcagatattcagcgcggaaatcattcgcgtggataaaaaaagcgttcaggttcgcctcggcgacgccgtggttgaagatcgggaatcccccctgaatttgcatctcgggcaggttatttctcgcggcgaaaagatggagtttactatccagaaatccatcgaattgggtgtgaacgtcattacgcctctgttttcagagcgttgcggagtcaagctggacggcgagcgtttggctaagaaaattcaacaatggcaaaaaatcgcaatcgccgcctgcgaacagtgcggtcgcaacactctgccggaaatccgtgaagctatgcagttagaggcctggtgcgccgaacaggatgatagcctgaagctaaatctgcacccgcgagccagcaatagcattaatacgctgccgctgccggtggataaagtccgcctgttaatcggcccggaaggtggtttaaccgccgccgaaattgagatgacctcacaccacggatttactgatatcctgctggggccacgcgttttgcgtacagaaacgacagcgctcaccgcaatcactgccttacaagtgcgtttcggcgatctgggttaaaggagaaaataatgatcaagctcggcatcgtgatggaccctatctcatccatcaatatcaaaaaagacaccagttttgccatgctgatggaagcacagcgccgcggttacgaattgcattatatggagatgaacgacctttatctccacgctggtgaaggccgcgcccgcactcgcttgctgaacgtaaaagaagataaaaaccagtggttcagcttcggcagcgagcaagatctgacgttgcacgatctcgacgttatcctgatgcgtaaagatccgccgtttgataccgaatatatttacgccacttatattctggaacgcgctgagatcaaaggcacgctggtcgtcaataaaccgcaaagcctgcgtgactgtaacgaaaaactgtttaccgcctggttcccggagttaaccccggatacgctggttagccggagcaaagagcatatccgcacattccaccagaagcacggtgacattattttgaaaccgctggatggcatgggcggcgcgtctatcttccgcgtgaaacaggacgatcctaacctgtcggtgattatcgaaaccctgaccgagcacggcagtcgtttctgcatggcacaaaacttcctgccagctattaccgaaggcgacaaacgcattttggtcgtggacggcgaaccggtgccttactgtctggcgcgcattccggcacagggtgaaacccgtggcaatctggccgccggtggccgaggtgaagcccgcccactgagcgaaagcgactggaaaattgctcgtgcggttgctcctacgttgaaagaaaaggggctgatctttgttggtctggacatcattggcgatcgtttgactgaaattaacgtcaccagcccaacctgcgctcgcgagatcgaagccgcgttccctcaagtatccgttaccggtatgttgatggatgccatcgaaaaacgcctggctgataaaaaagcctgattctacttggggttgcggcttcaacggcagcaccccatcattttattactttcatccgcaaattgcggctgtttatcttttacttcagctagttacctataaaacataatgaatttacagcatcacttccttattgctatgccttcactacaggaccctcagtttaagcgctcggtggtatatatttgcgagcacaatgaagaaggtgccatgggtttggttatcaataaacctgtggaaaaattcactgtggaatccgtgctgaataaactaaaaatcaccccttctccgcgcgatcctgccatacggttggataagccggtgcttgccggcggccctttagctgacgatcgcggttttatcctgcattcaccgcagccaggctttggctccagcgtgcgcatttcgccggaaaccatgatcaccacatcaaaagacgtgctggcgacattaggtacgccggaacagccgaaaaatgtgctggtggctctgggttatgccggttggcaaaaaggccagttggagcaggaactgctggataattcctggttaaccatcgaggccgatctcgatatcattttccatacgcctattgccgaacgatggcagcaagcagccaataaactgggcatcaatattttcaatatcgcccctcaagcaggacacgcctgatggctaaccgcaccattctcgcctttgattttggcaccaaaagtatcggcgttgctatcggtcaggaaattaccggtacggctcgcgcactgacctctttcaaagcgcaggacggcacgccagactggcagaaagtcgagaaattgttgaaagaatggcagccagatctggtggtggtagggctgcctttaaatatggatggcaccgaacagcctttgaccgccagagcgcgcaaatttgccaatcggctgcatggccgttttggtgtacctattgctttacacgacgaacgactgagcacagtagaagccagagcctatctgttcgacagcggcggctatcgtgctttagacaaaggcagcgtagacgctgcctcggcggtgattattctggagagctggttcgagcaacagcccgagtaatatcttggcaagatcatatcataaatgccctgagccaaggcttggggtcgccagcccatactttccccgcaaaacagatagcacattgatttaaaatcactttaccatgataaacaccgctatctgcggcagaatgctgccaatttacccctattgagctaagcacgcggtacaatagggcttggcgaatagttttagctgacatagtatgctgccccgcgatgatatcggcggatgaaattgggcaacggcggccttgattactatgcttagcctctattgtctcgatgccggaaccgccaagttgcgcaacggccaacgccgccgtctctgtagagatttatttaactctgacagattgatggcgcagaatatcgctcatccttagagggtgttttttacatttattgaggttttctcatgacaaaagtgactgttgctgcaacacaaatggcctgttcttgggacctgccgaagaacatcgaaaatgccgagaaactggtgcgacaagctcacgccaaaggcgcgcagatcatcctgattcaggagcttttcgctgcaccttatttctgtattgatcaaagccctgagcactatgcgctggcccaagagctggacaatagcccgctaattcaacatttctccaagctggccgccgagctggaagtggtattgccactgagcttcttcgaacgcgccaacaacgcttactataactctctggtgatgatcgatgccgatggctcggtgctggatgtttatcgtaaaacccatattccaaacggcccggcctatcaggaaaaacaattctttattcccggcgacaccggttttaaagtctggcaaacccgttatgccaaagtcggcgtaggtatttgctgggatcaatggttcccggaaaccgctcgcagcctcgctctgcaaggcgcagaagtgatcttctatccaaccgcgattggttcagaaccggctttcccagaaatcgacagccagccacactggactcgcgtacagcaaggccacgccgcagccaacctggttccggttatcgcttccaaccgcatcggtaccgaagccagtcaatatatcgatggtctggaaatgactttctacggttcttctttcatcgccgaccaaaccggcgctttagtggctcaggctaacaaaaccgacgaaaccgtattagtacatgaatttgatttgcaggaaatcgctgcacaacgcgcttcatggggcctgttccgcgaccgtcgtcctgaaatgtatcaggcactggcgacttctgacggcaaaacccggagataatcatggcgttgcaaacaactcctcggcaggacggtttctatatgcctgccgaatgggcacctcaagacgcagtctggatgctatggccttaccgtcaggataactggcgcggtaaaggtattcctgcccaacaaacttttgccaaggttgctgaagctattgctcgcgccacgccggtatacatgggcgtaccggccaaatttatggagcaggcgaaagccactatgccagccaatatcacattggttgaaatggagtgtgacgacgcctggatgcgcgataccggcccaactatggttatcaatggtaaaggcgaacgtcgtggcgttgactggaaattcaacgcctggggcggattactgggcggtctgtacgccgattggcgacaggacgaaaaagtcgccgaacaggtgaaccagtttcataaaaacctcagctatgccgctccgttgattctggaaggcggttcaattcataccgatggcgaaggcacactgctaaccaccgcggaatgtttattgaatccaaaccgcaacccagacctgaaccaagaacaaatcgaagcattactgcgggaatatctgggtgtaacccactttatctggctgcaagacggcgtatataacgatgaaaccgacggtcacatcgacaatatgtgctgctttgtacgccccggcgaagtggcgttgcactggaccgacgaccagcaggatccgcagtacgcccgatccgtggccgcttacgaagtactatcgcaagcggtggatgccaaaggccgtaagctgaaagtctggaagcttcctgcgcccggcccgctgtacaacaccgaagaagagactgccgacgtgctgtcaaccgatgcggtgcctcgtactgccggtgaacgtctggcaggttcttacgtcaactatctgatcagcaaccagcaaaccattttcccaatgctggatagccgtaccgatgatttggccaaagatctgttgcaacaaatgtatcctgactacgccattattggcgttccagccagagagattttgttgggcggcggcaatatccactgcattacccagcagattcctaagccttaatctgtacgtcatcagcccggaacttatatccgggctgatattccccgcatacccccgttgattctcctgacaaattccccgctcccaagagtctccattgctggacgtccctcttcgttgcttatgttttctctttccctctttcttttcttttgccttttgccttttgccttttgccttttgccttttgccttttgccttttaatgctgcgtccaacgttgttcttcggccagagccaatacgccctgattttgacgctgtactaaaccttgctcaaaagtttgcattcccatcgctccaccggtttgcatcaaactggttagctgatgagtttttccttcccggatcagatggctgactgcaccggtttgtaccatggtttcaaatatagccactcgccctccacctcgttttggcaacagcttttgcgcaattacggccatcaggctccccgccagctgactgcgtacactgcccttgtcttccgccggaaatgcgtcaaccagtcgatcaacagcctgcgccgccgtgcgggtatgcaaggttcctaacactaagtgtccggtttctgctgcggtcagcgccagcgtaatgctttctctgtccctcaattcccccagcaaaatgatatccggatcctgccttagcgctgccttaagccccgcactaaaagacggcatgtgctcgcctagttctcgctgctgaatcaagcatccctgactgtgatgaataaattcgataggatcttccagcgtaatgatgtgtcgccctcccatacggttaatcccgtcgagcattcctgccagcgtggtggatttcccactgccagtcgctccggttatcaatatcaaaccgctttcacagggtaataaatgatgcacgacctccggtgcatccaactcggccaaagtgggacattgggcggaaatcaaacggaaagcggcggaaagcccacgttgctgttgaaagaaatgcccacgcagccgcgttccacaagataatgaaaatgaaaaatcaatctgcccatgccgttgtaatttctcataatgcacctcatctaacagttgtcggcttaaattctgtatccatgtcgatgtaacctgcgcgacctgcctgaatatatgcaagtcaccgcaaattcgtaacgcgggatgatagccagtacacaggtgcagatcggaggcattatgctttacactagccgccacccattcattgaaatccatatcaaactcccggggtcatatgagcactatccaacagaacctacaggatgtcaggaaccggatcgccgctgctgcaaggaattgcgaacgctccccagaagaaattacgctgcttgcagtcagtaaaaccaaacctgtggccgcgatcgaagaagccattgccgccgggcaacacgcctttggtgaaaactacgttcaggaaggggtggataaaatccactatttcgccgggaatcccgagttggaatggcactttattggcccgctgcaatccaataaaagccgtctggtagcggaaaattttgcctggtgccataccgttgacaggctcaaaattgccaagcgcctgagtgaacaacgcccggcggacatgcctgcactgaatgttctgattcaggtcaatatcagcgatgagcaaagcaaatccggcattcagctcgccgaactccctgagttggccgccagtatttatggtttaccaaacttgaaattacggggtttgatggcaattccagcgccagaaagcgattttgaacgtcagcttgccgtttttcagcagatgaatcaggctttcttaaccttaaaacagcgctaccctgaaatagatacgctttctatgggtatgaccgacgatatggctgccgccatcagcgctggtagcaacttggtgcgcatcggcactgccatttttggcgctcgcgactatggttccaccgcgccagcgcaggcttaatcgaggatatttatgcaacatcgcaaaattacatttatcggcgcgggcaatatggcgcgcgcaattatcgcgggtctggttgcaggcgggtatccggctaaattaatcagcgtctgcgctccttcagccacccatcgtgatgctctggcgcaggaatttggcgtaatcagtagcagtgataacgtggctcagactcgtgaagccgaagtagtggtactttcggtgaaaccgcaaatgatggccgatgtctgcaagccattgagtgagcaggtagatttcggtaagaaactggtattatccatcgcggccggcatcagcgtttcgcgtttttacgctttgctgggagacaagctgaatctggtgcgaattatgcctaatacgccctctctggtaggaaaaggcatgagcgggctttatgcgccggagcaggttaaccaggccgatcgcgattttacctctcaattaatgggttcagtcggtaaagtgtgttgggtcaacgatgaaagcggcattaatcaggttattgccgccgcaggcagtgcgccagcctatttcttcttgtttatggaagcaatgcagcaagaagcggaacgtttagggtttgatagcgaaaccgcacgcctgctggtacagcaagcggcttctggcgctacagcgctagtcgaggccaacccgcagctaccgctatcgactttgcgcgagcaggtcacttcgaaaggtggcaccacggcggaagcgctgcgcgtatttaatgagcaacatttgtcggatattgtttcccatgccatgcaggccgcaatcagccgcgcccaggagatggagaaactgttttaatccatccaatggctgataagactgatttacaaaacaatacgctccccctaagcctttatcattaagatagaggtactttacagacacttgaatatgattaaggactaaaggcaaccatgctaacgctgacttttttggctaaaaccgtcattgacctttacgtcatggtgctgctattacgcatctggatgcaaatggtacacagtgacttttacaacccgttttcgcagttcgtggtgaaaatcactcagccgatcgttggcccgctgcgacgaattattccgtcattaggcccgatagatagcgcttctctgctgttggccttcctgttgatgaccatcaaatacccgctattactgctgattcagggcggcggcatgtccctcagcccttataacctgctgtttggcgtaatttcactggttaaggccgccggttatctgatcttctgggtgatgattatccgtgcattgatgagttgggttagccagggccgaagcccgatggactatctgctatatcaactgaccgagccgctgatggcaccgatccgccgtattctgccagcaatgggcgggatcgatttttccggcatggtagttatcctgatcctgtatctgatcaattatttaggtatggatctgttaggcgagctctggttcgtactgtgagtgcagtcactcccctgctggacgggctggcgatcaggctatatattcagccgaaagccagccgcgatcagattatcggtttacatggcgatgagttaaaagtcgccattaccgccccgccggttgatgggcaggccaacgcccatttgatcaaatttatagccaaacagtttcgagtggccaaaagccacgtcatcatcgaaaaaggtgagctggggcggcataaacagatcaaaattattcatccgcagcagattccacctcaggttgcagcactgctcgaatagtcggataactccgctgctccattttgaatggcacgaaataaattcaatcaatggcacaaaaccatcaggtttatctcacgatggaaagcaggttaccggcgtaacaatcaatcaggatttaccatgcaaaaagtcgttttagctaccggtaacgccggtaaagtacgtgagttagccagcctgctggcggatttcggtctggacgtggttgcgcaaaccgagatgggcgttgagtctgcggaagaaaccggtttaacctttatcgaaaatgccattctgaaagctcgtcatgcggcacaggtcacaggattgcccgccattgccgatgattctggtctggccgtcgatgcgctgagcggcgctccgggcatttattcggcgcgctatgctggtgttgatgccagcgatagggaaaacctggagaaactgttggtaagcctacagaatgtgcctgaaggacaacgcggtgcgcagttccattgtgttctggtgtatatgcgtcacgccgaagatcctacgcctctggtgttccacggcagttggcctggcgtgattgcacgggcagcatccggcgcaggtggctttggctacgatcctattttttacgtaccggaattaggcaaaacagccgcagaactgagccgcgaagaaaaacaggcagtatcgcatcgcggtaaggccttgaaattaatgctggatgccctgcgaaatgcttaagttgccaccgcttagtctttatatccatattccgtggtgcgtacagaaatgtccttattgcgattttaactcccatgcgttgaaaggagatgttcctcatcaggaatatgtcgatcacttgctggccgatttggacgccgatctgccgctgaccagcggacgagaaatcggcaccatttttatcggcggcggtacgcccagtttactgagtgcagaagcgatgcaaagtctgctggacggcgttagagcacgcctgccggttgcagcagatgccgaaatcaccatggaagccaatcccggcaccgttgaggccgatcgcttcagcggctaccagcgggccggtgtcaatcgcatctctatcggcgtgcagagctttaacgagcagaaattagtgcgtctggggcggatacacggcccagaagaggctaaacgcgctgcggcgctggcaacctctttgggtttacgtagctttaatctggatttgatgcatggattgccggatcaaatgctggaagaggcgctggacgatttacgtcaggccatcgcactaaacccccctcatttatcctggtaccagctaactatcgaacccaataccggtttcagctcgcgtccgcccaagttgccggatgatgatgcgctgtgggatattttcgagcaaggtcaccagttgcttagcgctgcgggttatcagcagtatgaaacctcggcctacgcaaagcccggttaccagtgccagcacaaccttaattattggcgctttggcgactatctgggcattggctgcggcgctcacggaaaagtgacttttagcgatggtcgcattcttcgcacggtgaaaaccaagcatccacgcggtttcatgcaaggcaaatatatggacaggcaacatgaggttgaaatagccgaccggccgtttgaattcttcatgaaccgtttccgtctattggaagccgcgccgcgcggtgatttctataattttaccggtctggaagaaagcaccattcgctcgcagctggatcaggctatcgccaaaggctatatgctggaaaccgatgaacactggcagattaccgaaaaaggaaagctattcctgaattcattgctggaactgtttttatagttgtcagagcgcatcgtaaaaaaacgggcattcgcccgttttttattttatcggatggaactcaatttaaggctttgagcagctcaatacgctgttgctctagcgtggtcacccgaccgcaaacttcatggccgaagttctggaaatcttgttcctgattgttccattcagtctgaatcgcttgctgcaacccccccagattgcccattatcgcctgcaatggattattggaagaaccgctcgtcgcctgcttaacgcccatttcattcaggctatcctgcaaaacgccccccagactctgttgcacgatggcgcgaccgtccttctctacttgggcaatggcctgatggtggaaagtcagaccgtcgctgcgtttctcaatgatgcggctcatttgctgtttcagctgatcgttcaacgtcgtcagccggttacgcacattactgctgctccccaactgttgcacaatgacgttatccaaagaaacccgggctttttccagatgctgttgcgcgcctttatcaatccacggcaaatctttacgcaatgcgctctgatagctgaacgctttctgccgctgagcctctgtgagagtcaatgttttgccgttgcgaatcacatcaccatccggtgagatttgcagatttccgctggctcccacaacctgtacgctctgcggactgataatcacatcatcctgaggttttacgttgcactgatattctgcgtgaacctgtcccgcagccaataacaaaagcgccagtcctgcttttcgtaacatagattctcctgagaaaccgtttatctaccgctaattatgacactgcctgagttttatcgccgccagtagtggactgatcctaaaagattgagcgaccaatccgctgggcaagtaactctaaggcagcggttccggccaatgagttccctgagacatccagttccggtgaccataccgcaatgcacatctcatcaggcaccacggcaataattccgccgccgacaccggatttccccggcatacccacgcggaatgcaaactcgccggcaccgtcatacataccgctggttatcattaacgcattgatttgtctggcttgaatcggtgaaataatctgttcggcatgattgattggccgcccctgatttgccagataaacaaaacagcgagccagctcgatgcagctcatacgcatggcgcaataatggaagtaagtttgcagcacggtcaaaacatcgttgtcaaaattgccaaaagatttcatcagataagcgatggccgcattgcgatccgaatgttcaaattcagaacgtgccacccggctgtcatagccgatagagacatcatcgaccaactggcgcaccacttccagcatccgctgcttaggcgcactcaggcgactttgaagcatgtcgcaaatcaccagcgcccccggattaataaagggattacgtggcttcccttgctccaactccagctgtaccaatgagttaaacggctggcccgatggctcttttcccactcgccgccacacttcatcctcgccgtagcgccctaaagccagagtcaggctgagcactttagaaatcgactggattgagaaacgctcttccgcatcacccgcctgaaaaatctgaccatcgacgccgcaaaccgcaatacccagcttatctgcggaaacttccgccagggctggaatatagttagcgactttcccttgcccaatcatcggtctaacctgatcgaggatatcttccaacagcgtattcgataacgtctttaccacggaaatactccagtactttccccaataaaaataaaggcgcctatagcggcgcccttattatcaaacagtggtcagatcgttaggatcaatcccaccagatatcaaacagctcgctggtttctacgtttttcattttacgagcttccagccatttgctgaccaatgcacggtgctcatcggtgcaatgaccgatttcctgcaggcagattaggccttcccactgcatgtagccactaccgtcgaaagccaaaccgtttggttcaataacttcgtcgataaatgcgtctacggtggaatcgatcacatcaacgccagtgccttcagggaaggtccactgaacggagaaacctaattcctgaaactcatcgatgtgcattttcttgcgtaaacgacgactgcgattgttagccattattctttcctctcaaacatcagatcccaaacgccatgtcccagacgctggccacgtaattcaaatttcgtcaacggacgtgaatccggacgaggaacatagtcattggtttcggaaagattacggtatccggagacggccgacatcacttccaacatatgttccgcataaggttgccaatcggtggccatatggaatacgccgccgacttttaatttactttttaccagttccacaaacggagtctggacaatacgacgcttattgtggcgcgccttatgccatgggtcggggaagaatagctgaaccatatccagcgaaccttccgggatcatgttttccagtacttcaaccgcatcgtgacacatcacgcgcaaattgttcagttccgcttcatgagcgctgcccaaacaggcgccaacgcccggcgagtgaacttcgatacctaaaaagttctgctgcggattattggctgccatggtgaccaaagaggtacccataccgaaaccaatttccaatactgtcggcgcttcacggccaaacagcgtgctcagctcaaccggggtcgtttgatattctacgcccatcaccggccagtagttatccagcgcaaactgttggcccttggttaagcgcccttgccggcggacaaaactacgaatacggcgcagtgcgcgaccgttttcatcaaactccggagatatgacgtcatttatcatggtgctttctgtctgttgagttgcgcaaaataagaacgcgcattatgcaaagatacgctagtttatcaactatgaacgcgagaagtacaaatttaaccacgaaatgattcattattaccgacgaaacttcgccaacccctcggaaagttccggtttacagccttcagactctatgctgcaatcccagccctaaattatttctctgccggatatcgatacttacctatgatgcaagcgcaacagttcgcgcaagtggtgcttgactggtaccaaagctacggtcgcaaaaccctaccgtggcaacgggacaagacaccttaccaagtatggctatcggaagtgatgttgcaacaaactcaggttgccaccgtcattccttacttccaacgctttatgacgcgtttccccgatgtgcgggcgctggctgctgcgccattggatgaagtattgcacctgtggacaggtttgggttactacgctcgcgctcgtaatcttcacaaggcggcgcagaccattgtggccaaacatcagggtgaattccctaccacttttgaagaaattgccgatttgcccggaattggccgctctaccgcaggcgctattttgtcgctggcgctggggcagcatttcccgatcctcgacggtaacgtgaaacgggttctggctcgctgctatgcggtagatggctggccggggaaaaaagacgtggaaaaacggctatggcaaatcagcgaagacgtcacgccagctaagggcgtgggccagtttaaccaggcgatgatggaccttggagcgatggtttgtactcgttccaagccgaagtgcgaactttgtccgctaaacgctggctgtattgcatacgccaaccatagctggccacaatatccggggaaaaaaccgaaacaaaccataccggaaaaaaccgcgtatttcttattgattcaaaatcatacgcaggtttggctcgagcagcgccctcccgttgggctgtggggcggattattctgcttcccgcagtttagtgaaagagaagatctcagtcactggttgcagcaaaaagggctaccagagcaaggtttgcagcagctaaccgcttttcgtcacacctttagccacttccatttggatatcgtgccgatatggatgaatgcggtaaccctgagtggatgcatggatgaaggagcgggtctctggtataacttagcacagccaccgtcggtagggcttgctgcgcccgttgagcgcctgttgcagcagttggccaagcagcctcctacccaagcagctttatttggcgatagtgccacaaatgaggatttagcatgagcagaacgattttttgcacatttttacaaaaggatgctgaagggcaggatttccagctctatccgggtgaagttggcaaacgcatttataacgaaatctcaaaagaagcctggtcacagtggatcactaaacaaaccatgctgattaatgagaaaaaactcagcatgatgaatgtggaagaccgcaaattactggaacaggaaatgattaacttcctgttcgaagggcaggatgttcacatcgaagggtataccccgccgagtaagtaacgccaaagggccagtcatggccctgatgttattcctcatcacgatatggcttgtaagatgaagaaaattttagctttgctagtgattgccccattattagtttcctgctcgggcaataaagatcaggccaataatgaagcctttatcaaagacaccaatgggttcgaaatcttaatgggccaatttgcccacaatatcgaaaacatttggggtttgagtgaagttttgatcgccggtccgaaagactacgtaaaatataccgatcaataccaaacccgtagccacatcaactttgatgccggtaccattacggtagaaaccatcgcaacaaccgatcctgccgctcacctgcgtcaggcgattatcacgactttattaatgggtgatgatcccggttcgatcgacctttattccgatgttaacgacatccagatcagtaaagagccgttcctttacggtcaggtgttggataacaatggtcagccaattcgttgggaatggcgggccgcgcattttgcagattacctgttacaaaccagaatgaaaaaacggacttccggtctgcatgtcatctggtcggttacgctgcaactagtgccaaaccacttagacaaacgagcccacaaatatctgccgctggttcgacgttcggcggaaaaatatggcgtggaagaatcgcttatattggcgattatgcaaacggaatctagcttcaacccttatgcggtcagcggttctgatgctctgggtctgatgcaggtagtacagcacaccgccggtaaagacgtattcagattgaaagggaaaagcgggcagccaagccgtagctatttattcgatcctgaaaacaacatcgatgcaggtacggcttatctgtctattctgcaaaatagctatctcggcggcatccagaatgccaccgcccgtcgttatgcggtaattaccgcctataacggtggcgcaggtagcgtattacgcgtattccatagcgataagaatcgggcgttctccattatcaacagcatggcaccgggtgatgtattccaaacgctaaccaccaaacacccggcagcggaatctcgccgttatctggtaaaagtaaacagcgctcagaagagctatcgccgatattaatttagctttattcctaaataaccggtaaaaatggcacagttttctgtgccattttttttattctcagaaagcaccaataccactctttgccagacagaaattgtgttcattatcacagtgcacgcaagaacaatgggaaataaaccacggcagcctatagtaaaagctcctcccttcttattactcagactgaacaaatggatcttggatttacgctattcgaattagcagccatatttgccaccatggttgtcgcctacattatctttggcctgaccgggttcggctccgcacttattgctagcccggttttagcactttttatcccagtcgcaaaaattgtccctctattggcaatagtagatatgttcgctgccgttactaacgtcgccagacacagtaggaatgccgatcttggtgagcttaagcgactgatacccatgatgattatcggcagcttaattggcgctacaattttactcaaaacccgtccggacattcttttattagccttagggatatttgtcattctttacgcgctctattctttgagtcgacgtaaacctctggggaaattcaaaacggcggcagccgtgccttttggcttagtcggcggcgtgtttagtgcgctatttggcagcggcgggtttatctatgccatttatttatctggtcgaatagaaagcaaagataacctgcgcatcacccaaacaacattgataggtttgagcaccttcacccgcgttattttatttacgctggccggtgtttatatggatttatcgatcttattgatggtgttgctgttagccccaggtatgctggcaggcttaaccctcgctaataggatcagtttaggtatcaaccgcgagcagctaataaaactaataaatatcctgttactgttatctggtctggttctgttaggtcgctatttcagccaataatatgcatctccagataccaccggctaacccggtggtatcagaaaaaaatcagtctgcgatgacgtaccccaaaatacgtcgccactcaacgtcacccttttcgatatatacgccctgtaattccggtgagaatcccggtaataggttaattccctcttccagtgcgaggaaatagcgctgagcggcaccaccccatacttcaccgggaacgacgcaaagtacgcccggaggataaggcaaagcgccttctgcggcgattcgcccttcagcttccgctatcggaattagctcaatattatctcggataaactgaatattggcatcctgcgaattcatgactacctgcggcaagctggctttgcggaacatctctttttgcagctgttttacgtcatgactcacgtataaattgtgcatttcctgacataaacggcgcagagtatatccgcgataacgctgctcattcttccgatataccgtcggcaatacgtcacacagcaatgaatcttgcccaacgtgtcgctcaaactgcgccaacatttctaccagatgagccattttagcgctattttcagccggcgtgagcaagaacaaaattgaattaagatcgcacttctctggcacaatgccattttcccgcaggaagtgagccaaaatagtcgcgggaataccaaactcgctatattggccgctggccacatcaataccaggcgtcgtcagtaataatttgcagggatcgaccagatattgatcgtcggtataaccatcaaagccgtgccatttctctctaggtacaaaatcaaagaaacgggcatcattcgcaattgtctcagtggcatagtcctgccagttcttgccatttatctgtagcgggataaagggttttagcaatgagcaacgttccaatattaattttcgcgcctcgatacccaatctgacacaatccatccacatattgcgaccactggcaccagaatgaattttggcattaacatccaacgcggcaaacagcggataaaatgggctggtagaagcatgcagcataaaagcgttattaaaccgtttatgattacagtgtcgtttctgccctttaatgtgattatcttttttgtgcacctgtgaggtttgggagaaaccagcctgctgtttatggactgactgggtcacaataatccctgggtcatcttcatttaattccagcaacagcggagagcaatctttcagcatcggaataaactgctcatatcctacccacgccgaatcaaacaaaatgtaatcacacagatgaccaatgctgtccacaacctgacgagcgttatagatcgtaccgtcgtaggttcctaattgaatgattgctaatcgaaatggccgagcttcatcggcacgctcaggagcgacttcccgcaactgctgacgtaaataacgttcattgaagcaatgtgcatcaattccgccaataaaaccaaaaggattacgagcggtttctaaatatattggcgtggctccggcctgaatcaacgcaccgtgatggtttgatttatgattattacgatcgaacagcaccaaatctccgcgagttaatagtgcattagccaccactttattagctgcagatgttccgtttagcacaaaataggttttgttagcgttaaacacttttgccgcgtgcttctgcgcatctttggccgcgccttcatggatcaacaaatcgcccaatttgacatcagcattgcacatatcagagcggaaaagcgtttcaccgtaaaattcgtaaaattgccgaccggccggatgtttacggaaaaactcccccccctgatgaccggggcaggcaaaagtcgagtttttcatttcgacgtattttttcagcgttgagaaaaacggcggtaacaggtttttttcatattcagcagcagaggcttcaagttgagcgagataaaaagctttattattttcgcccaaagccattacacctttaatcagtggcaggtaatcaacggacacttgttgatcgccttgcgcagcaataaaagtgggtatcccgaagccctgattatgcaattccgccagaataccgctattgacgtcttccagagaaaccagaatcaccgcgacgtcggtaaagtcagtttcataaagacatactacctcgcgtggggtagccagataggaaaccaaatttgcgcttgctgctattttcaactgtgtcatgttaccgagtctcaaactgtcagggatgagtcgtgccacccaggcacaaagatgaaatcttatgagataaatacacctaataatattccgtaagttgctattgaattagctgaatgactgatgaaccgatgtggagaaaaacacgagcggagcatgatctatctcatttcagctgtaaccaatagacatcagtaaaatcagagaatgaactctagttttaatcatgcctaacagtgagcagaggtagccttaccgcataggagaaacagcagaggaatcatagaagggcaagaaatagtgataggaataaatcattggctgacgggggagattttgcgtcaaaaaaaaagatacaacacttgtcatggacgcccctctttagcctgatttagcgtaataggatatgagtttcgcgcaataattgcatttttattagtgtgactcaagtggtaaatattcactaattgtgaatatttaatccattgttatgcaatcaactagaaattaaggggttatggttcgcaggcgctaaaccacactgtcactgattccctcctcctcatcgggctgtatttcaccttacctgaccgaaaaggcagcaaacgatcgactttatgacagaaactcattgacgatttagtgccaatacggtttaatgcgccccgttgcccggatagctcagtcggtagagcaggggattgaaaatccccgtgtccttggttcgattccgagtccgggcaccatatttagagaaaccagcctacggctggttttttgctttctggcatctggactcttcatcgaacacgttcgattattcgagccaaaggctctcaccccttcggggccgtcgcaagcgacgttcaaagccgcctagcggcgttgtccgagtccgggcaccatatttagagaaaccagcctacggctggttttttgctttctggcatctggactcttcatcgaacacgttcgattattcgagccaaaggctctcacccctgcggggccgtcgcaagcgacgttcaaagccgctgaaacgaaatgtctcgcaaactcagatgtcgtgcaaaacctttattacatctgggtatcgtttcactgcttattctcttaaccacttccccacggcatagtctaataaaaagaatcgcagataaaccatcgccgatgctgtctgactccaaaatgaactgcactcgataaaaagactatcgggctaatgaacatattgagggagagtagcggaatgactcaaataggaaaaatttatgctggcaggttaaatttattcgttacttagatattgataataactctctttcaagatcttttacgtcaataaaaaattaatataactaatacaggatgcttatcatttatttctcaatcaaatttataacccaatgaaaaacagtactaattacattataaaagcagagattgaatgtataaaaaacataagcctatacttcacaataaatacaataagggtgacatgcgtttattatcatacaaaataaaaaagcaccagcaatacaacaaattgtcagaaaaacctcagccataaaaatctgtaggaattttcccacataaattggttcgcttatcctatgtccagccagatatattttctatatcattctctcatcaagtaatagacgcagataaataatgactgccaaattacttttaataaaaggcacgtggaaacctgacgagtataaccgaataacattcgcgaacatagtcactagcccacttcacatatataaagttaaacactcattcctatctaaatacgaatgaatgctaaccgcacatttaattattgtattggagttttaaatgaataagattactttggctatcgcgttattctctgcatccacaaccgtagcaatggcggcgagcaataatacaattacattccaaggggaagtcacagcgcaaacctgttcagtgacagtcaacgggcttgacgcaaacccaatggttttgctgccaacggtatcaagtacagatttagatgcttctggtaaaacagcaggtaagacaacctttactctgggtgttgccggctgtgctccaggggttgatgatattgacatcaaaactgtgtttgtaggtagccaggttactaccgccggtaacctaaaaaatacaggcaccgcaaccaacgttgaacttcaattactgaaagactcaaccacaacaaccggtatcgatctgaatagcggtgtagcacaagatggtatcgtgttaaaagcgggtgatacatcagcagaacatgattttgccgttcaatactatgcaacagggaaaaccaccccaggttcagtcattgcctctgtccaatatgcggtttcttacctgtaaaaaaataagcgtgaccgtataggatatactttaattaactggtgcggcaggtacgctgcaagtaagtaaaatcacccgaggaacttagtaataagttgctcgggtgaatgtatgcagcatatctctgaccacactcggcaaccagggatatagttatttcgcccgcatttagaggatatcctcatggcaattaatatacttggttaccgttacctgtttatcactcttttacttttcataggcatgtctttcgctcaggctagtgtagtcatgaacggtagccggattatttattccgcaggggaaaaagagcacagcgtacaattaaccaataatgatagctttcctaatgccattcaggtttggctagacagcggcgatgcccagtcaacaccagacacaggcaaggctccttttatcgttaccccaccgttctttcgcattgaagctaatgcaggacaaacattgcgcttgaaatataccggcagtggtctgccgacggacagagagtcagtgttctacctgaattttttacaggtgccccccgtcaataaagcagaaaaaaataacaaaatgttagtgctgatgcgtaatcgcattaaagtattttatcggccagaaaatattgcaggccgcgtagatcaggtacccagcgcactcacttttagccttcaccaacgaggcaaggatgtcgttgtcacaggaaagaaccccactggtttctatgccactattgccagcgcggaagtcgttggaagtggtaaaaaacttaatatgaaatcagaaatgattgcgcctatgtctcaagctgagtgggttattccgaattcatcggccccctcaaatgctaccgtaaagttcctactcgtgaatgatttcggtgggcaagataccggcagttataaaattcagtagcatctttccggcgaaggaatatttatggggtttgtacgtgtcagtctaaaaaagaagttctccggccgtaaaaaagcattaactttgtgtattactttaatcttatatgttgatgcgcctttagctcaggaagaaccgcaagacctcgaatttgatgaatctctttttctaggaacaaaattcgcctcaggtttgaatcaactgaataaagagaatgccgtaaccgccggaaattacgatgccgtagatgttctgattaataacaggctatttaaacgtaccactgttaaatttattaaaaatgctgattcgtcagaggcctacccttgcctgaatgatgaattcttaacagccgctggcgttgaactcacggctaaaggcgattccctatcccgacaacccaacacacctgaaatagagtcacgcccttcagattctgcgattccgctgatagaacaatgtgttccactggccgagcgggtcaaaggcgcgtcttttcactttgatcaggcaaaactgcgattagagctatcaattccacaagccttattaaaaaaacggcctcggggatatatagagcggagcgaatgggaagaaggtgaaaatctcttattcgttaattacagctccaacttttatcgcagtgagacaaaatcccaacagcaaaatagcacctctgattatgcttttatgggattaaaaagcgggcttaatttaggattatggcaaatacgccagcaatccaacctgcgctattccaataacagcaacggtagcgatagccaatggaataatattcgtacttatttacaacgccctattccccaattagatagccaattaacgctgggcgaaactttcaccgacagtacgttatttggcaccctgtcatttcgtggagcaaaaatagccaccgatcaacgtatgtggccggaatcaatgcgcggctttgctccagaagtccgtggagttgccagtaccaatgcgcgagtcattattcgccagaatggccgtgaaatttatgaaaccaacgtcgcccccggcccgtttgttattaatgacttatatagcaccaccagccagggtgatctcaacgttgagatcatagaagcgaacggtagccgttcaacatttactgtgccattcagcgccgtacctgattcaatgcgccctggcgtgagccgttatagcgccgttgccggggcatcacgcgactttaccaacattgataactatttcactgattttacctatgaacgcggcctgaccaatcagctaacgggtaactccggtttacgattagcgaaagactacaccgcgctgctggccggaggagtcattggcacttcagtcggcgctttcggcctcaataccactttctctcacgctaaggtcgaaaatgaccaaacccagaatggctggcgtatgcaggcaacgtatagccaaacattcagcgaaaccggaacgaccttttcgttggcgggatatcgctattcaaccaaaggttatcgcgatttaaacgatgtatttggcgttcgttccgtgcaaaagaacggcggaatatgggattcatcaacctataaacaacgcagccaatttaccaccacaatcaatcagaatctggggagtttcggccagctttatgcctctgcctcaaccagcgattattataatgatacgcagagggatacacagttacagctgggttattcaaataactatagggatatcagttataacctggcgattagccggcagcgtagcgtttatacctcgacgctgtatggttgggaaaccgaagatagtaataatacgacgacgacacgctatggtaataccgaaaacatcgcgacattaacgctgtcaattccgctaaatatcggcagcaaaagccaatatctgtcgatgtctgccaaccgtaatccgaaaagcggcaatagctaccagacatcgttatcaggcactgccggtgagcggaattcctttaactattcggttaatgctggctatgacgataataaaatcggcaataactcaaatagttggggagccaatgtgcaacaacaattccctaatgcgaccgtcaacggtagttattcgcgcggcaataattacacccaatatggtgccggtgcgcgcggtgccgcagttattcacggcaaaggcgtaacatttgggccttatttgggtgaaacattcggtttaattgaagcggatggcgcccaaggggcaagcgttcgcaacgcacagggggcccggatcgataataacggcttcgctctggtgccagccttaacgccttataattacaatacgataggtttagataccaaaggcattaatcgtaataccgaactgaaagaaaatcagggtcgcgtggttccttacgccggtgctgcagtgaaagttaaattcgagacactgaccggctatgcgatgttaattcagactcaaaccgccgacggtgaagggttaccgctgggtgccgacgtgtataacagtcaagatgacattgtcggtatggtgggtcagggaaaccagatctatgtccgtgtgaaagacaaaaaaggttcgctgcatgtccgctggggcgaaaacagcggtgatcaatgtgagctaccttatactttcaatgatcaggataccgagcaagatattattcatataacaggcagttgccaccgttaacaattatgagaaaaataatgttaagaccaacaaagcagttaataccttgcgaagtctcacggccaacgtccactgcctgttatcgccgcccgcgtattctggctggtttaataatactgatcgggctaagcagtggttctgcctggtcagcctgctctaaaattaccgcgcaaagtcagctaggtaccggtgatggaacggcgggttcctgggcgggttctctggataacaataatggctcgctgggtttaccaggcattatcgacctcagtaccaatgcaaatttccagccggatggcacattattagcagcggcgacatcaaactttaccacttttgccctgaatactggctatgatcccgaacgagtgctgttccgctgtgatgcagccgacgtagatcagatcttcgaaatgtatgccacaaacggtgataataattatgcgggtaaaaatgaggacggcaccattgctggcaacgttccctctggcttcgccacctatgtacgtaacgttgttatccgtattactaatttatcaactggtgagtattactctagattatggaaaggccgtcgcctgaccgatcttgataaggacagcaccggccgtattctggttaaagcgaagaacttcagcaatatctataccgaactgtttcgcattgattatgcccgaagtggtaccaataacgcggcttcttatacctatgcctacactcagcccaacgcctatattgcctttaaagggccgggtatcaatgggccgattgaaggcactgatgcggtatcaaactggcccggctggtatgcaacctggcctgcgtcaatcggcctgtacaattatgttaccttccgccggacgacgatttgcgccgtgaccaattttacaccaacggtgatattacccagaatttctgtagcagagctgaatagcggcaacaccagttcggcggaatttcacgtggattttcaatgccaaactggcatcacatctggagtgacttctggcgcagttgcgatgggctttttggttcccgcagcaaacgcagcaaaagctcaatcattgggattaatgaatggcagtggcggtatcagccatttgatatcagataattatggtgcatccggaacggccagcggtgtcggtatccgtatttatcgcaacaataacccaattaatctgctatcaaaaaacgtgacattaaccggtaatagcggtggctggtatggcatcttcgacggcgcgcagcaaaccaccggcagtgtaaccggcggaaatagctacactgaaaactttcgggctgagttaggcaagatcagcgggcaaactgttacgccaggagcggtgaatgcacatgcgcaagtggttatccgtgttcaataatatgccattcaaacgcctgactagcggcatcacccgcttacttttgctactaatagtggctcatagcacacccgccgtggccagcgtgatagcggaaagaacgcgcgtgatctttagtgaaggccataccgaagagtcactgcaattggttaacagcaatagctatccagtggcggtgcaggtctgggtagatgatggcgatttaatggcaacgccggagaaagcaatttctcctgtattagtgcttccgccgctgtttcgtctacaacctcaggcgcagcgcagcctgcgactcattttatccggcgtcagtaagttgccgacagatagagagtccgcattttggctcaatgtctacgaaattccgccaaagaccgtcactcaagtcgataacgagtctttcgtgacattggcactacgtatgcaatacaaagtattttatcgccctaagaatatagctgcgccgggagacacgctgagtaaagcattaaccttcacgttagagcgcaacggcgataccgcagtggtcaaagttgataatccgacgccttattatgcatcggtcgcctccctgacattaggctcagcggaaagtctgccggatatggtttccccgtattcaacgctcaactttcctctcaaccgctctccggcagctggcagcactagccttacttttgctttgattgatgattcaggaaacagtaagggttttagcgccaatctaaaataaagcgtgtttctgtagcaagcgcgcggtcggatgctttccctccgcgatttgcatcactcccctcgccgtaatgccacacggactcattccgtaaaaaccctgtagatcagagcgacctaattgttctatttatagaacgtaatgagctattttcgcgtctactccgcttgttgttgtgaatatatagtaattaagtgaaacagctttgctgaaacctaaccgattcggtcgcacctaagtacaacaaaggagaatacgatgtctatcccagctaatttcaatggtcaacgcccagttattgatgtcaacgattccgtgatgctgctgattgatcaccaaagcggcctcttccaaaccgtggccgatatgccaatgccggagctacgcgctcgggctgctgcgctggcaaaaatggcgaccctgtgcaacatgccggtaatcaccacggcttccgttccacaaggtccgaatggcccgttgattccagaaattcatgcaaatgctccgcacgcccaatacgttgcacgtaaaggagaaatcaacgcctgggacaacgaggatttcgttaaagcggtaaaagcaaccggacgcaaaaccctgattatcgcaggcactattaccagcgtttgtatggctttcccgtccattagcgccgtcgccgagggatataaagtgttcgcggtcatcgatgcatcaggcacttacagcaagatggcgcaggaaattacgcttgcccgcatcgttcaggcaggggtagtaccaatggataccgccgccgtggccgcagaacttcagagcacctggaatcgcgcggacgccgaagcatgggcggaggtttacactcagatattcccagcctatcaattgctgattgaaagctatagcaaagctcaggaagtattgaaaagtaacgaaaaactggattctcagcgttaatccgcaggtaatccatagttagacaagcctcggttgaacctgtttcgtaccaacggacaaccgaggcttgaatcgaatagaccagtgccctatcgcccttcttttatcgttccgaatcgttcagccagaaaatcaatcaaggcgcgaatagatggaagcagccctcgccgagaagggaataccgcatgaataatttcccgacatgtcgcccagtcaggtagcagacgaaccaaacggccatgttcaagctgagatcgcaccatcatcgccggaagctgaaccacaccaactccggcaattgccgccttgcataaggtttccatatcggtagagacaaatttaggcacatggtgctgggtggtttgcatcccatcggctcccatcagcgtccaacaatgtttttccatagaagacccgtaaccaagcgttggccacgacgccaaatcaaccggcgtcaacggcataccatatttttccagtaaaatcgggctagcgacaaggtactgagcggcatagcccaaccctcgcataactaaatcagccccatccacaggcaaaggctttaccctgatggccagatctacaccttcagtcagaatatctacggggcgattcatacctaagagctgaatactgacatcggggtattgtaaggagaaatctaccaacatatctcccacataggcatgcaatatagttatcgggcaagccagtcggacggttccgcaaggcacggactgtgctgattcgataatggcctgcgcggcttcagcctcaactagcatagatcgacactgggtgtagtaagcctgccccaattcagtgacggtaaaaatacgggttgaacgtaggataagccgcactcccaaacgttcctccagcataccaatgcgcctgctaagttttgatttgggcatatccagcgcgcgagcagcctgagaaaatccaccgtgctccactacctggacgtagtaatacaggtcattaagatcttgacgcatagaaaatttgtttaaaatacagtgtattagagaaaaaataacgtatagcacacatactgatatttgatttaccgatactgctaaagaatgctgcacacctgtttttctacactccgacttcctatacctctattccttatttattaagaaaagaatataggtggagcacagcattctacttagatcatcaggaagattgggattccgatttatcctctacttcacccgtatgcttgccttcatcggttcctttccaaccatgacgctgaatgagggaaagatgagcgcgttcttcggcaaggctttccgtcagcatttcgctggttcgcttatatgccgcagcgcgagactgggtatcgctctccccttccgccatttcctgtaccatctggagattaaatctgcggaacagatcggcgcgctcccgcgcttcatagcggcccagaccgagtttctccaacgccagacgcccgattttcaacgccccttcaaaggtttcacgctccggttgagcaacgcccgcgtgtttaagctgaatgtaatgctcgacatcccgcgctctagcaatgatttgcaggtttgggaaatgctctttcgccatttccgtaagctgcatactggttgccggatcgtctatggcattgattaacacttccgccttgactgcccctgcggattccagcaaatccatacgtgtcgcatcaccataaaacactttcattccgaatttccgcagggtttcgatatgctcaggatcgtgatcgagtaccactaccttcacgccgctggaaagcagcaagcggcctgctatctgcccgaaacgaccaaatccggcaataatgactcgcgtctgttcttcatcaatttcatcggcttcgcgctccggtccgtggtcggatttctccattcgcgccaacaacactagtaaaatcggcgtcatcgccattgaaagcgccacggccaaagtcaaggatttcacccagtctggctctaacacattcgccatttgcgccgcgccaaaaacaacaaaggcgaattcactcccctgtcccaaaaatacggcaaaccaatagcgctgcttgcgaggaacattaagcggacgcgcaattaaccacaggactgtcgttttgatgatcaggaagcccgccagcaaaacgataatacgcagcggattatcgatcagcgtgccaaagtcgatcgacatcccgacaccgataaaaaataaccccaataacaaacccttaaagggttcaatatcactctcaagcgcgtgtcggtactcagagctcgccagcaacaccccggcgagaaaagcccccatcgccatagataatccgacttcttccagtaatagaccaaagccaaataccagaaatagcgctacggcactgaaaacctcgcgtaaaccagagcgagcaacaaaacgcagagccggacgggtgacataacgccccaacaaaatgaccaacgtaagcgttccggcaactttcagagctgaaaacgcaaaagcagccagagtggtggatgattcgctggcagctaaaagtggaatcatcgcaaccagaggaatcgccgctatatcctgaaataacaatacggaaaaagcgctgcgccccatctgcgaagccattaaatttcgttcattcatcgcctgtatagcaattgccgttgaggagagcgccaatgttagcccaattaaacaggcaatttgccagcgcagacccagcaacatacagaacaacccgataagtgcgccgcaggccaccatctgtaatgctccaccgccaaagacggagacgcgcaaattccacagtcgctgcggatcgagctcaagaccaataataaacagcatcaataccacgccgatttcggcaaaatggagaatactgtcaacatcggtaaccagccgtaatccccacggcccaataatacatccggcgatcagatagcctaataccgaacctaatcccaaacgcaccgcaattggtacgatcaacgccgctgcaccaagataaatcagtgcctgtatgagcatatggctatccataaaacgcctccttccattccatcagacggtgtttgtaatgacgagcctgggcctgaagcgtttcatcatcacaaataaaagtattgtgcatggaaaaaggcggtaaccatttcagaccgcaataaagtgccgtggcctgaaacggctgagcaagcacctcaaagccgggatgactccccatgccaaaatgattttcgccaccgccggtggtgaccgcccacatcagattttttccacgtaacgccgtaccaccgtgaccataagcccaaccatgagccaaaactttgtccatccacagcttaagcagcggcggcatgctgtaccactgcatcggatgctgccagataacgagatcggcacgagacaacgctgcctgctcagcggcgacatcaatattgaaatcgggataaagttggtaaagagagcgaatttctacaccttcgagagtctccgcctgctctatcatgcgtttgttcgcatgagaatgctgcggataaggatgagcatatataattagaatcatgtcttttccaaaaagtattaacgcacttaattattactattaagataacctgttttaccaaaacgctttattcgatattaatatctatttatatcaatcaattacattattgagtttaccctttatcaacaatggcataactgcgagacgcttagattaaaagcgctcacataatcaattataggtatgcctcaccctgattctcttcttcctggcaattgaatctctgcgatatggcattctttagcgatatatccttagtctgttgcacttttccggcgttttctcaggaggccaaaactcctttcgtttagcgaggctaatcagttaatctccgctcaacagacccagtgcattaatatgaagcaggaatgttaatcaccctatttattaacagataaattaaaacaatactaaacagtaaagctaattcttactcataacaatcacaataaaattgaaaaaatgagaaaaatccgagaaaaacaaatagggatgtccaacgaaaatgcaaagctggattgggtaaccaactaatttaatgatgaaaatcaattttgaaaaaaagaaaaatataatacccaagactacaataacaaaagatcaaaaagtactaccagtcacacgttttgttacttcgttcaaaaaataaaactcaagtataatttagcgtgttaattaatcacctcatgaattatcattcttatctaataaatgactcactcatatggagaatgataatgaaggtcttgtttatcgatggagcacaaaagtcattgcattatgataataagaagatcgtgctgacagaaaaggaatttttgatgctacagttcctgctcaatcgcaggaaaaataatagtattcctataaacgaaatcgtcactcacgtttggaaaggtagagagagcattatcggtaaaggtaacgtttcgcagctggcttatcgtttaaggagtaaattatcaaccataggtgatgtcattcagatatccatctcaatgaacaacggcggaaattgcaaagtccagcggaacatcataacaattattgcaagcaataatgggatcatgtgttttctggtcaagttcttactgaacattaaggaaaataattcattataatcaggattaacctcaatataagtagatctgaaactctgacagtataaccaacaggtatataaccaaagataatccagcgtctcaaactggataaactaaaagaatcgtaaataacttgaatagaacagaagcaataatttattatttataaataatcaaaccattgagtatcgaacgacaatgagaaatagcatttaacttatccaaacgaatcgggcaaaacggaaattaattaccacacctctctgttgacttaattctcatttagttcatacgagagatgaaattaactaccatagttgcgagttaaaatgattgattacactgattttcatgattacacagagcggataggtattatcagttagccattaacagtggcaaataaatggagataaccgcatgtcactaaagtccccggcagaaacacagattattacatggataattatcggcattttttctgcttggggaggtttagtacgatacctgatggacagacaaggcactcgcagtaaatggagttggatgggtgtgctcagccaaataacgatatcaagcttcaccggtttattaggtggattattaagttttgagagcggcgccagccattacatgacattcctattttctggattattcggcacaatgggcagcacagcgttgagctacttatggcaccgtttatctaattcgtcagggaagtaacatggcttattttatacaaaaccatgccaacagacagaactaaccaatagttagtccccaatgggtccaagttgttcactcagtattttaactttcacaaagagctactcatgacatttttactcccaactatctacagcaccggaatattattgttcgccttgcttcttatcgtacttttggttcgtcatcagcagcgaacgtctaaccaagctcaacgggataatcaacggctaaaagcgcagaatgacttattgaatgcccggttattacagctgaaaagacaggctgaagatttagcctcggctataaccaaacaagcgcagcatacaaaacagctggagaagaaaaatgcattgttacgggaacaaccgcatgtcatccaggccgaaaaggcctaagctgctcgaattaccccaacacagctatccgacaaaatgcactcccacagagtccaaataactctccgataaaacttatcccacataatctttgagagttagtccacccgtatgagattgaacgcagcaagattatccagactaaaataggcctaatatttaccccccctatactccccattaatgaataagaaaacctttcagaaatacgcctctctcactaactttattcaacgtcactgaccgcttctctcccgtcctcaagttttccctaccacagcctgaaaagaggcgcaaaagaatgcaataaatttagcgcatcagatcaagccattattatttaatcaattaaatacgttataacttataatttaataaaaaaacaaaataagttttgcattaaaatataaatatcgctgtcatcactcaaaaaatcaaacacgaatagcttagttaagataaaaatagagcattaacgatatcatcaattataacccgatattgatttcttaatcagtgatttattgaatagtcttttcgtaccaacaaattggttggtataaaaaaggataaagatatgaacaaggtaaccatcacgattaatacagaatcaaatacagttgaagtggaaaaaccaactgaaatttataaagctcaagcagcggctttaatctccgcccccctcagagcaagagtcgcagccgaagtagcgccaaactccagcaccgaggtcttctatcaaagcactcccattattccagaaagccgccgaaacataatgatcactaatgatggcgcggcaaacctcattactgccgagtattattggtcgcacagtttcactagccaatggttcctttatacgtccattgaggtgagtgtcggtgaatctaagttactgcagtcaccatcgaactctctatattacagcaaagtggtattggtaaataaaaccagccgaaaagcgtacgtaacagcagaggagaaataaaagtagcgattaattaacggattgtaaatcttctatcagaggaaaatagaaacagcctgaaaaatcttatcttcatgccagtgaagagccaggactttacataaaattctgaatttcggctcaagccggattgagactttttatggccaaaaaaaagttttaaatattcaatctgatttgaataaatcatgaaaataaaaggtaagttaaatgaataaaattacagagtatgacaatatcgccagtctgactccttaccctgtctatgctagctcggcttacgagtttgactggaattcttccgctatccttaagcaagcgataattaaaggtatatcctttattccttacgttggagattatctgtcctcaattatcgatttcttctggaaagatcaagaacgcgatatttggcaggaaatgatgggacagctgcaccagcttattgaggaaagtgtccttaaagcgattcagggtatcttattaggcgatatcgccgaacttaaaggcaagattgcatccgtagtttccgcgctacaggatcatcccggtacgccagaagccaaaagcttatatatgagtgtctccgtaaatttagacagcgtacagcgcaagttcactacctttgatcacaaaaccaattaccatattctttccatgtattcgacgactgctctgatgcaaatcatgtactggactatgggtattgagcgtaaagatgaaattggattaaacaacaatgaggttgggcaacttcagcggaacattgatcaactggtaaagcatgtcgaagattatacacagggtatttacgatacagagctagatattcagtacaacgaatcttcacccaatacagtggcaaataatgtcatgtacgcccacggttattgccgggtacatggtatggaatatacagagatcattcaaaacgttcaaaaaaatggcagtaacacgaaaggtctgtatttaaaaacgttgtgttatttcaccttctttggctggccaaccagccaggctcggattttagcgttaaaagatgaaattaatatgcctgagccattcaaacccagtctggttaatggtcgcatcaaccagattaaatcgattaaaggctatatccagcgtattggcggagctttgcgagtaggcgggttcgaaattatctttgcaaacggcaacagataccaacagggtacggttaccggtgaatcccgctcaatagaacttaatggaagcctgattaatacgctcgaaacctggggaaatggagctatcgatgaggttaaatttaccttaagcgatggccgaaccttgagtgtcggtcagcgctattcaactaactatcggaaattcgctctcgagggtcactatatttctggcatttttgtttccagcgatcgaaaagagctggccggtcaggccgcgaatatttgtgtttcttaccaccaaaaacaatagctttattaatatagagattattttcaattctatttaaaactaaaaacaaacaggaaataaaaaatgaataagatgcctatggctttattgttatctattttttgcatttcatcttatgcagctaatgatgtgagttcaatttcagagactagtgttccacctgaaaagaacatgcaaaaatcactcaataagagtgaaacctatacctatataaagtgtgcttaccggaaaaacaaagataaatcgtttgacgctacgtcatcctgggaatggggccgcgcaggcaattcagccaatgattatgccaccgttaatggccattggtattccagcgctattttagccaatatgttttatacgaaatcaactcatcaggaaatcaaagacgtttgtattaatacattaaataagaaaaatattagttttaccgaccttatcccttatgcgtcagattacacgttgtcttactactattcgttctggaatgaaggagacaaaataccgacaattgatattggtaaaactaaactggaccgaatggttgtctttggtgacagtctatcagatacgatcaatgtctataatggttcctacggaactgtgcctaacagtaatacctggtatttagggcacttctcaaatggattggtttggcatgagtatctgagccaaaaacacattaaagtgcctagctacacttgggcaacaggtaacgcggagagcggtagcggccttatcttctccggctttgggcagcagctggactcttttgagtcctatataaaaaaatctgatgggtattctatcggtaaaactctttttctggctttatttggtggcaatgatttcattacgggcagcaagtcacctgatgacatcattaataactataaaaatgatttagtccgactaaagaatctaggcgcgaagcagattgcggtatttagtctacccaacttttctactgttcctgctgttaaaggttggagtcaatctgataaagacaagttaaaaaataaatctatcgagtttaacactaagctaatctcattaatcaattcactgaaatcgacatatcctgatgttaaatggattatgccaaatctaaatacggcgtttgaggatatcatcaaaaaccctgagaaatttggctatgttaactccaaagacacctgtttgaatttgcgagattcaagtctcgattatattaccggtgcgtcaccacgagacgaatgtaagaatagtaatggcgcttttgttttctgggataatatgcatccaaccacgaaaacacacgaaaatatcagtgacattttggcgaatgaaatcaaattggcactgtaataccttacgttgtatccgataatcgtcatgcaaagtgcgcgtatatctacggctgtggatatacgctttttacggccattagttctcaccgccgttctttatcaacgttacggtttctcactgctatttttttctctactatttttctctgctactttttaaccgtcatttgtttttattagtcttgttaacaattcgttctctcagagcaaagacgcagcctaatccgccttgtattttactcaatcagcaatctattagatgaaaagcggggcgtcatttcacaatgcacatcggtcggccagaaatcggttcgcgatgaatttgcgcgtcaatctgaaaagtttccgccaagagctccggcgtcatcacctcctccggcgtaccctgaacaataactttgccctgcctcatcatcaccaaattgtcgcaataacggctagcctgattcaggtcgtgcaatactgcgaccagagtttttccctgttgattttgccgacggagcaacgccattagttcaacctgatgattaatatcgagataagttgttggttcatcgagcaataacagcggcgtctgctgcgccaataccatcgccagaaatgctcgctgacgctgccctccggaaagctcgctgaccaatttatctgccagatccgcgatctgagtatcgcgcatcgcctgctcaactttgcgtttgtcatcggcgcttaaccgcccccacagatttaaccacgggctgcggccatagccgaccagttcgcatacccgaataccttctggtgaaacgtgctgttgcggtaacaatgcgagttgacgagccagttcgcggctagataatgcggaaataggatagttatcaagccatatgctgccagatgatggcgtcagcaaacgcgaaaaacacttcaacaaagttgatttcccacatccattcgggccaagcaatgcggtaattttgcccgctggcagagtcagcgataagtcgctaagaatggtatttttaccgtagccagcgcgcaggttctcaattgagagttgcatcagcggtttctcatcaaaagccagaaaaaataaggagcgccaatcaccgcggttaatacgccggctggcagttcaaggggaggatgtagcgttctggccagtagatcggcccataggaggataagcgcccccaccaacattgccgcgggaatcagcagcaaatgacgcccaccgactagttttcgggtcaaatgaggggcgaccaacccgataaatccaatcgggccgcatacagccacgctgatagccgccagcgctactgccaatattaataccagcgattgtacgcgccgtaccgaaatgcccagcgttgacgcactattctctcccagcgccatcacgtccagatcgcgacaaaaccacaggctaagcggcaacaggatgaccagccagggagcaataaccagaacaaatgaccagcctctcccccacaaactgccggtcagccataacagcgcgttattgatttccagcggatgtgacagcatcagataatcggtcagactggcgtaaaaagcggtcagagccacgccagttagcgccagttttaacgcggcggattgacccgcgcagacgcgaagtagcataaacgccaatacgccgcccatgaaagcaatcggcggcaaccacagtaccgatagagcgggaaatagcatcaaggcgctaaccgacgccagccctgcggcatgattcacccctaaaatatccggtgacgccaatggattgcgaatcaccccctgaactaatacaccggacaatgccagcgccgcgccaaccatcattgccagcagcgcacgaggcaaacggtattcgacgagcggaaaatagttgtcgtctgccggaagaaaagccatgcgcatctggctgaaactcaaagtgtgggtgccataacgcagtgacagcaacaatgtcagcaataccaacgccggcagcagtatcaacgtgatgaatgggcgcttcatgttcggctcctgaccaaccagataaagaccggcgcaccaatcaaagccaacactgcaccggcggggatttcgcccggccacgccagcactcgcgccagtaaatccgccagtaacatcagcgtagcccccatgatcatgctgacaggcagcatacggcgtaggtcataaccgatccaacctcgcgccatatggggtatcaacaagccaataaaggccagcggcccagctacgctcacgcaggcgcccaccagcagcaataccatcagattaattaataatcgcaaacgaggaaggttcactccaagtgagtgagcgctttcatcgctgacctgcaatacattcaagcggctagcaagcagcaacgccagtggagccacgatcagcgtgaaggggaataaatgccaaaactccggccagcgcgcatgagcaacgccaccggctagccagttgagtatgctgtaggcctgatcttcagacaaaatcagcgttgctttggccagagcagcacatagtgccgataccgcaacgcccgccagaaccagccggctacggtcacctgcctgctgccagccgccgccaagtagcataacaacgccccagctgatacctccacctaaggcggcagccaaagcaatgctaaagccagaaaacagctgcgggctaagagcgctaaccactaccatcgccagcgaggctccggcattaatccccaataatgagggggaagccagcgggttgcgggtcagcgtttgcagcagactacccgccagagccagactggcacccaacagcatggcgaccagactgcgcggcaagcggagattcagcaccaaagcctgcgccaaggttgccggcgcacccggaaacaaagcgcgcagcgcctctaacggcgcaatcggcacggccgagcggcaaaacaacgtgagccagaaaccaagcgctaataccaacagtggcaatgcccagcgccacccgataaaaaggcgttttattagcataataacattgcgatcatggcgtttcgtttcttgaccgatgatgcaaaatggccacggcgtcactggcgatatgctctgcggcaaaaaccccgcgcatacgcgcccaggtattgctatctaccgcagcaacatgattttgctgtgccgctttcatcacctgccacagcggatctttctgccactgtcttacaatactttcctgacgataatgcgcgacgatcagccattctggatcgatcgctaatagctgttcgagactaatattggcgagcgcctgcttattcacgggttcaggcacgatcaggcccaaagcggtcaaaacgctgccagtgtaagattcacggctgtgcagattgaactgctgttcgcgggaagtaccgaataccactttttcaccttccggcaactggccggcaaaagcctgcatacgttgatgatgttcggccaagcgcggctgcattaaggcatttttccccaacacttcaccgattatcgccgctgattccagattttcactgtaggtttcattgcgagacttaagcatcagcgtcggcgcaatgccttttaacgcagcataaataccaccgtggcggctgctgtccgcgatgattaaatccggttttaaagccgcaatagcttccagactcggctgtgaacgtgttccaaccgactgccacggctgaatgcgctggcgtacctccggcaatattctttcgggatcgttatcgtccgctacgcctaccgggctaacttcaactaaggctaaagcgtccacaaatgacaattccaaaaccacaacccgggaagccatgccattgaaagtaaaagcgccctgctgatcctgcaccgtcacagctccggcgttgcctagacataaacacatcagacacacgggaatggccaatcgtgagataaaagacatagaacctctggcagaaaaagtaaaaattaccgggcatcctatagagacacccggcatagcagcgatgctgaaatattagaatttcaccgaaccttgcagataaagggtacgcggctggccgacatacattcctttgttgttatcgtcataggcgcgggtgaagtaatggtgatcgaagatattcttcacgcccaccgccagattcaggttggccatttgcgggccaaagttgtaattggcgcgagcgccccacagcatgaatccaggaattcgcccgttactgccgtccacgctttctttcacagtattggcattgtccgcaaactggctggactggaactcgctatttaggttaaacgtccaactacccggtgaataatccagccccagcgtgcctttgtttttaggtgagaacggcacctgattaccgcggttagcaccttcttcacggattatcgcattcacataggcatagctggcgtaggccgaaaggttatccaatgcgggagataaatccgccagatcgtagcgcacctgactttccaaaccgctgtggcgggttttaccgcgagcggtcacgctatcagtcacctgattggaatcatactgattatcaaagttaatcaggaacagtccgacttccgctttcacgatgtcgttatcgaagcgcgtccccaattcccatgtgcgcgctttttccggctcaattttgccgctatccacggcttttccgatttggctgtactgcaccgtaccgaaggaaccttcggtattagcatagatattccaggcatcattcaggtgataaaccacattcagagcgggcagaggcgcgttgtagctgatgtcctgcttagtattcttaatgtagttattctgataagactgaatacgctcatagcgtatccccggcgtaatcgtccaatcaccaatatcaatacggtcatcgatataccaggcgtgagcctgagttccggactgagtatcccggtcaaacgggctgctggtagtcggtaattttccactgctggctaaactggtgtagcgcaattcatgggttgattcgctaacgaaacgatagccgatacccacttcatgggcggacgagcccaatgtgaagctttggctataacgcggttcaataccacgaacccaatattcgcgcggtgacagggtgatatttttgccctgattgagatagccactgcgtaaggtgtaggtatagaagctctggatattaaacttatgctgttgatccggttgatattggtaacccagactcgcgagctggcgacggccccagaattcgtcgtaaggacgcgttgactggaaagggtcggcgttataagccgcacgtgacaaaccgcccggcatttcagcccgaccttcataatattgcagtaagctattgaaagtatgtacatcgtttggcgcatagcgcgttttcaacatcacatcgtcgattttggtggaactgtgttctcgccagtcgctaccgcgagtgccagaatacagcagcgccgctcccagaccgttatccgccgtgccgccaatcatcagatttccggtgcctttgggatcattctggctcgatgtcgggctcagtgcgccttccatgcccgctgagaggccaaaatcctgcggaatagcgcgagtcacgaagttaaccacgccgccaacgctttgcggcccgtaacgcacggcaccgccgccgcgcaccacatcgaccgcatccagattacccagcgaaaccggtgcaagggaaagctgaggctggccgtaaggggcaaaaggaacgggaataccgtccatcagcacggtagaacgactggctaaacgcggattaaggccacgaataccgaagttcatcgccatatcatggctgccagtgccattgttttccggcgcattcacccccggcatacggtttaaaacctcacgaacggtagtcgcacccgttttagcaaactctgcgcggcgcacgacatcacgcgccccggcgtgttcaaaaatgtcattttcacgcgcatcccctaaccaatcaccgactacggtcagagtatctgcgttagctgagacctcaggctccagcgtgaaagcattgccgcccagcgctttactccgtaaaccactacccgataacaaagcgtgtaaaccgctattcaccgaataattgccgtttaggccttcgctacgtttgccgcgagtcagtgaggaatccactgacaaagtgatctcagactgactggcaaacagattcaatgcggtatcgagatcacccggtgcaatgtgatagctcgcggtggcagaagccgccgtcgccattaccggtgccagcatcgccgctggaattaacgtgcaatgaatggcgattgccaatggtgttgccttgctaaaaatgccaaaaacgcctgcgcgtgaagaaatggacataccctctccagaatttatgtttttttactgtgctatgtaggagtcgaatgaaatcgcaaaaggtataatcgcgaatgcgactttttatcatttttatttagaaataagcattcaggcaggcaccactttcacccaatatcgggtaagtgattgaactttaacaggaagagtttgagtcagtatttttagcaaacgatcggtatccttgagaggaaaagtgccgctaatacgcagctcggcaaccgtcggatcgcagcttaggcggccatgtcgataacgcgcaatgtcttcaatgacatcacccagccgcccgtcactgacgcttaatcgcccctgagtccaacttccggcaccggcgattaacggagtcaaggcagagaaatcccgatcgctgaaactcaccgactgaccttcattcacggtgataatttgatttggagcggcgcgtagcttcacttcgacggcgtgtttaagcaccgataactgtgtgatatctccggtttgtcgcacgataaattgtgtacccaacgcccgcatccagccctgcgatgtttccacaataaaaggtcgagcctgcagatcttttgcagtggtaatgccgatctctccctgatgtagccagatcagccgccgatccgtcgtataacgaatgtctgccgcactggcggtattgaggaaaagttgggaaccatcgctcaaaggcagagatttaatttcaccggtcgaggtgcgcgcatctgcccacagcccttgcccggtaggcgactgccaggctttccaggaaccaccgactcccagaaaaaccaccaatcctttcaatacccgacgccgagtgatttccgcctgctgtcgtgcctgattgagggtttgatagctgaatgtaccgggcatgctgtgaaactgcccctgtaatgcctcgacccgctgccacgcccagcgatgatcctcatgctgctgataccaaagttgccacttttgcttttgctgcgacgtgacgttttcgtcacaaagggcagcaaaccactgcgcagccattttcaaggcccgttgctgagattcagataatgaggaactcatggcgtttgaggatgttccagtgcaaacagcaggcaatgttcggtcgcttttgccatatattttttgactgaaataaccgatatctgtaaacgttcggctatcaccggataagtgagcccttccaactgcgacatcagaaatgcctggcgcaccttatgcccaagcccatcaagcatggtgtcgatttgttgcagcgtttccaacaggcactggcgctgttcaggtgaggtgacagaaacttccggcatttgcgccagcatttcaagataggcacgttccagcgcgttacggcggaaatagtcgatcatgacccggcgagcaacggtgcataagaaggatttgggttcacgaatttcatgagctttattgccgacgagaatccccataaaggtatcctgcgccagatcgtctgcatcatatgtcgatcccagcttcgatcgcagccaatttcttaaccagtgatggtgcgagctgtagagagcttcaaagctagcagaaggtgacgcaccagcgagagtggacatagacggttacaaaaccctaccgagaatttattcaaggataataattgataatagttatcattacaatcgagaatcaaatgctattttatttcctcctttttaatcaatttgttagcgttatactcgcaggttctggctagagataaatttaaacgctttattggcgtgagtttacatgaatatgatcagcgtcaatcagagaattccgcgtcggtatcggggcgttctttaaaagagatccgatataactcatgccattacattaaatataaggataaggataaagataaagataaagataaagataaagataaagataaagataaagataaagatacagatacagatacagatacagatacagatacagatacagatacagatacagatacagatacagatacagatacagatacagatacagatacagaattaaagttttcgtcagtctatttaagaaaaccagccttgcggctggctattttatctctggaatgtatttatcccgcgactttagcgactctagcttgatgtttaagaatatcccgtgctgaatcagccataatcataatcgcacctgccagcatcaaagtatcctttaatatcaatcgtcctgcccctgataaataagggaaaccgtggtgcatgtctcccaaattcggaacccaggcttctggcgttgtgattaaaaatgaaagggtaacaaaaggcgtcaggaacgctagcaggccgccaatcaggcctagccaacggctaaacggattggctaagaccaaaagagcaatcagcacttccacaacacccagtccattagaaaaatcgtaggtgttattcatttcttgccactgtctggcgacaaggtttaactcaccttcgtgcgtcatatactgtttatattcggtgggattctcatagaagaatgacatcaacgggctattggcgacaaaaggggtaatactatcggcttcgtaaggtacaaatttcaacaaaccgatccagataaaaacaatcgcaatgcttaatcggatcagggtaagaccgaccttatcaccccgactcagtaactctaaatacttgttcatcgataaactcctttttatttatctgacacagcagtagaaaaccgggttaattagataaacacccgtctttccattgatgagataataggtttatctgagtgagttgcatttttcacagactctgaatttttttgtcgtatcgtctgaaatagcgtgactacccataatcgataaaacaactctccgtccgaaatagagcgttgtaataaagcagaatacttttattgaaccagactgaataaatcgtttaaagattcactcatcgaaggatgagtaaaaatctgatcgcgtagtatggtataaggcagccccgcatccattaccatttttacggtattgatcatttcgtgagaatcagggcaaagcaacgatacaccgagaatctgctgtgtcttattatcaataatcgcttttagcacgcctctcgtatcatttaacactcgagctttcggaatagcagcgaccggcagggtaacaacctgaatatcggcaccgctattgcgcgcttgcgtttcggttagcccaacccgagacagcggcggattcatgaataccgaataaggtacatgtttacgatcgccggtatggcgtttaccactccccaatagctgatcccgaacaatgcggaaatcatccagcgaaatataggtaaactgcggcccaccttttacatcccccatcgcccagatatgactcgccgtggtacgtaaataaggatcgaccatcacagcaccgcgatcgttaacctcaactcccgcctgatgcaattgtaaatcttgagtattcggcgctcgcccggacgcaaccagtaaggcatttacgttatagtcaccttgatcggtatgcagctgaactgcgccattatattcagatacgcaatcgaccttggcattgagcaccagttcaacgccctgatctttcaaaatacccagaatcgcccctgctacatcctgatcttcatgaggtaaaaagcgcgatgccgtttcgaaaatagtcactttactaccaaactgagcaaagattgaggcaaactccacgccaatatacccgccgccaagaatgcccaaatgaacgggcaaagtttccagattcagcaggccggtactgtcataaacccccggcgttgatgctaaaccttccaccggtggcattaccgacttcgctccggtattgataaagatcttttcaccggtgagcgttaattccccttccggcgttgtgactcgtagcgtatggctatcaataaattccgcacgcccatcaataacatcaacattctccaaatccgccagattgtgataattcttatcccgcaggaaattaaccagatcggatttacgacgcatagcctgagaaaagtcataatggagttgcgcatcatgaaccaaagctttagttgggatacagccaatattaatgcaggtaccgccatacattttctttgactgctcaataatggcaacttgccagccggctttagccagggttacagccagagttttcccgcctttcccaaacccgactatgacagcttgataatgattcatgattcatcctcgccaagaatttctaatccaaacctgagaaaaataacgcccctaaaaatcccagaacgatttcgataggtcatagtgtagctataacgactgtgctaacgtatttccatcacgcttgataaattgttctggagtctaatttggatacccttagcaggctgatcgctcttaatcccccgcggggccgccttgaccgtaattgtattctggatggtgactggcaattacctcacgccgcaggtgacttatccgtcattcgctggcatgtggtcattaccggttcggcttggcttgatttatcttccggcgagtcccgcctgctggaaaataccaccatgctgctgttaccccaaagctccgcccatcgcctgcgacagcatacaaaagaaaatacccagattttatgcggtagtatgaatatgcccattagcgctcgccattttctgaccgcgctgccagaggtattggtgctgtcccctgagaatgcctcagtaagtcgggagtggttccactacgctatcaaactgatgcaggaagaggtgaatcgcggccagcccggtgccgaagcgatttgcagccaaatgtgcgggatgtttttaacctttgcgatacgtggttggctacaacattctccactggataaagggctactgcaggctttgctacatacccgattaggtgaagcggtggctcaaatgctggaagctcctcattatcactggacggtggaaagcctggcgcaaatcgcccatatgtctcgggctagttttgccgaagtgtttcgtcaggtctcagggacaactccgctttcattgttgacgactctgagaatgcagcttgccgcacagcgtctggctcgcgaagccgcgcctttggtagctatcgcagaactggtgggctatgccaacgaatcatctttccacaaagcttttgtgcgccattttggctgtacgccggggcaataccgtaacaaagctaaagaattggcgacacatagcggagactagagggttggccataaactgcctgttttaaacagaaacgcaactcatcgtttattcgctgtgcgtttattgacgacgaactgagtaaccattcgtttattcaccgccagtgtggtggcaacgctccgatcgccagcacattatcattcccttttatcctattgcacccggcttaatgggtaaccctcaattttaatcccaatgttatttttttgaataagattcatataaactgaatgcctttctctatcagtcgaactgaaatgtgattatcaagctgcaaagacttacaaaaacgcgtcgaattatcgaagcgaatgtacattctctttttgataaatgccatgtgttctatcttctatcttctatcttctatcttctatcttctatcttctatcttctatcttctatcttctatcttctatcttattatcgtcgacattatatatcttagctaattccttattggtgcagcgttgtagcataagaaaaaaataatatccctgcacgtttaacaagtcattttatacctcgctaaggcaccatcagggaaacctcatttacgttagaaagcgcctttggaagagcaagattaattgccataggggagctaataatacaagtagatataccgacagccagaacttactactcttaaccggtttttactttccagttgattatttatcgcccgatttaatcagaacgactaaatataaccgcgcacctgctgataataaaatgcctaaatcaggaaataaaaaagtcagccactatataggctgactttttaacagacttttatgattaatttatatcgggatgctgggcgataagattctttctttttttctccagctcagcaatttcctgatcgatatcctcaatactttgctcaatattatcatggtgttcttgcaggatttccttagcttctgcccggtcggaagctgccggcgtagcgcctttcagcggtttattcgccgtttccttcataaatatccctgtaaccaaacctataaccgcaaccaccatcaaataataggctggcatgaagagattctgagtggattcaaccagccatgcggcaatggttggagtcaacccggcaatcattaccgatatattaaaagcgatggccaatgcactgtaacgaatatgcgtagggaacatggcaggtaaagttgaagccattacgccgataaagcagttcaacaatacggccagaatcaacaatccacagaatatcaggccaatcacgccgctgttaatcaggatgaagcatggaatggccaaaacaaaaaggccaatacttccgcatacgataaaaggtttgcggccaaatctgtcgctcatcaatcccataattggctggacaaacaacatacccaacatgatggcgatgatgattagtacaccgtgatcttccgaataatgcaggctatgagacaagtagctcggcatataggtcaacagcatgtagtaagtgacgttagtagcaataaccataccaacgcatatgatcagatttttccattgcttcgttagaatttcgcggaaagaaacctttggcggttgagtaatattattgcgcgcatcgctatccatttgctcaacatgctgttggaaggttggcgtttcttccaaagcgtggcgcagataaataccaatcaatcctagcggagctgcaataaagaaaggaatacgccatccccattcaaggaaattagcttcaccgacaatgctggaaatcagaacaaccactccggcgcctaaaataaaaccggcaatggaaccaaaatctaaccaactcgcgaggaaaccgcgctttctatccggagaatattcagcaacaaaaatagccgcgccggtatattcacccccgacggaaaagccttgggccaatttagccaataacagtagtatcggtgcccaaatcccgattgatgcataggacggaattaagccaatacagaaggtactgacagacataataataatggtgacggacaaaactttttgccgtccaaacttatcgccgagggcaccaaagaatatgccgccaagtgggcgaaccaaaaaaggtacggaaaaggtcgccaatgcggcgatcatttgaattccgggatcggctccagggaaaaatacttgccccagtgcgaaggcgacaaaaccgtaaacaccaaaatcaaaccattccatagcattgcctaatgcagccgcggtaattgcttttttcagtttggtgtcatcaatgatagtgatatcattgatttgcataggttttacctttcttttgcgtaatcccattatttactcccttgtattcatcttcattccactgtgtaaagccagaaagagttaattgctttagcagccatcaaaaaaatttatgtaactatataagtaataacctatgtaattacgtgatgcaatgaagaatcaggtggaaatacgggctgaatggctatttttactgacaaaaactgacgaaatttttatgaaaaaaaaccttatttttctcaatgttactgatattttttcctttagaacttacagggttagcgaaaattgacaaaaaatgacgaagacttaaagctcacgaagaaaaggacgaaatcatcgacgcgttcaaaaaaaataataaatttcctttgacagagcaaatgactgttcttgcggaataaataacctaacgaattattttgatacattctcgttagccgaagcaaccatagataaatagtggctaataattatctgattagccataaataaggcaatgacgctttagtagaatggcgaggccctttatttattgtttcccttccttttttagcagcgctctcttgcgctcaacaccccaacggtagccagacaacgcgccatcctgacgaacgacccgatggcaaggaatcgccacagccagcatattggcggcacaggctccggcaacggcgcgcaccgcctttggtaaaccaattttatcggcaatttcgctataacttgccgtggcacctaacgggatttctcgcagagcttgccagacccgctgctgaaaagctgttccgcgaatatccaatggtaaatccaggccaatttctggcgtttcaatacaccccaccacctgagccaccaggatgtcaaaagcttcatccccgccgattaaaaccgcctgaggaaacttatcttgcagctcttgcactagctgttgcgcactctctcccatccaaatcgcgcaaattccccgttcacttttcgccactagaatatcgcccaatgaacactggccaacggcaaaataaatagttgttccggttccaccgcgatggaatgccttaggcgtcatgcctaacatggcattagatttatggtagaaacgtgcattcgattgatagcccgcttcgaaaatagcgtcggtaacaaaacccgtttgcgccaattgctgacgtatccgctgagtacgcaaagcttcagcgtagccttttggcgtcaggccaatcgccgctttaaatcgtcggtgaaaatgatatgcgctctggcccacataatcagcaagttcatttagcgttggaatatgatcggacttttcaatatagcggcaggctttggaaattatttcgtactgctgatctccctgaacaccgccgcaacgtttacacgggcgaaatcctgctacttcagccgctaacctattcgcgaaaaacaccacgttttcctgccggggctgacgggatgggcaagacggtaagcaataaataccggtggtttttaccccatatataaaagcgccatcggcgtctttatttcgctggacgatagccagccaacgcgcccgatcgctcttgaaattctgtctagcattcataatcgttaaccctcgacgaatggaatcgttaaggcgttgccgtttaaaatttcggtcccgccagtgctagccagattaattcagagaaaacggtcaaacactccgcttcttgctttttcattcgagcttcgggtgaaaagactttaatattccccccccccccccgcgagcggaattatttttcactcatctttggataaagcccaaagatacaaagaagcggtggtgccatagggtgaataacgtgttctataacgtttaaagcgctctttagtcagttctttatgacgatataaattcatcataccgcgccgaatagccaaatccccccaactcacaacatctggacgcgccagcgaagaaattagcagcatttctgcggtccatacgccaataccatttaatctggaaagagtgcgaatgatttcgtcatcgctttggctatgaatatttgtcaaatccagctctccgacccgcaccgactctgctgcccctttaatatattgggcttttttcattgtcataccacagcgctgtatttcttcatcaggcaataacagaatgcgttcaggcgtaatatttccgactaatatctgcaagcgcgtattaacggtttgcgccgcttttaccgatatttgttgttcaacaatatattgcactaacccggcaaacagatcgggattggttggacgttgtaacatgccaaagcgttcaatggccgcagccatctttttatcgcgttttttgagatgctgaatctcagtttcgccataaacaaaaaacatgcccgcccctcagtgaattgccttcgctacgaatatccttcattgatactgtatttttatcatgatgaatagagccaatctggaaaatattgacgctaaacgagataggattttatttatcggcccaatgaggttcacgccagagtagttttcgctgccagtctcggcaaacgcttttcatccagcttaccatttggcgtgagcggcatttcactgagcaaatgtagctgactgggaatcagatattccggcagcctgtgcgccaaatcacagagaatacgacaaggctccggcgcgcaggccggataacactgacatagggtcgcaaatgccaacagtttttcctcagcacccaatcgttgaacgaccactttgacctgctttaataacgggcacacgcggatcaactgcgattccacttcggcaatatcgatcagataaccgccgattcgtacctcttcctctatacgccctagaaattgataatgcccgcaaggcagttttctgaacttatcgccggtacggtataagcgtaacctttggcccggtattggctgccactcgataaatcgctgggcagtaagctgcggttggttgagataccctcgcgccagcccgaggccagagagataaagctctccggcttcccccggcaggcattcggcaccgtcacggtccaaaatccaagcctgaatcccagtaaccggttgaccaacatgaacgcgctggccgaggaaaatccgcccataaagagcggttaccgtacattccgccgggccgtacagattataaagcgctacgcgatctgcccagcgatccgccagattttgtgggcaatcttcacccccgatggcaatcagcgacggtaaccctgcagcctgaatatcaagacgagctaacaatgcggtaggtagaaataagtggctgctgcggctgtggacaatagccgcggtttccccgcagccaagagccaattctcctccgcagattaacggcaacaaagcggccatattacccgcgtcaaatgccagagataaggcgttatacacccggctgttggcggtgattcctagccctttagcatgatctttcaataaattagccaaagcgccatgttcgatcattacccctttcggcacgcctgtggaaccggaggtatagataattaaagccaactgctggggacgacgaacgacctgcggcggttggctgcccgaccaacgttgaataccgcgaagaaatccggaagaggttatatcgaaatagcgggcgcaggaccaaagcgccattgaatcaccgctgccaacgccaagaatcacgctcagcccagcgtcggcgaccatatggctaagtcgtccaagcgggtaatccatatccagcggcacgtagcaggctcctgctttccacaccgccagcagtgccaccagaaaatagggatcgctaccggtaagtacgccgatccttgagtgctcacctattccctgttgattcagccagttggcaatacgattagcatctctttccagctgaaaatagctgatgatcccctgttgcgcattccttgccgcaatgcgatctggcgttaaccgactccagacctcgatcaggtcagtgaccgtttcttccatcggataatccatcaggccgccagagttgcgccaccatccacgacaatatcctgcaacgtaatatggctagctaaatctgaagccaagaacgcgaccgtttgagcaatttccgcaggcgtagcgattttccccagcgggattccgagcttgtactgctgaggaaaaccggcgatggtgcgttgctcggcgtctggcgtttgccacattccgcgttgcattggggtatcggtcgatcccggcgaaaccagattgcagcgcacgccatagggagctaactccagcccaacgcaatggctgaaactggttaatgcggctttagaggcacagtaagcggccatttgcatacgcggtacatgagccgcatttgagccaatgctgactatcgcgccggaccgctgctgcttgaacaccggaataagctgttttaacagataaaaagcaccagaaacgttgacgtcaaaacactgctgccagtcatccaaactcaagctttgggcttctcccatacgcaaaatacccgctgcgttcaccaacacatcgatgccggacgcaacctcaagcagttgctcgcaaacgtccgccacctgcgcaggctgcctaatatccagcactgccgtagtgaaaggatatttttcattgggaaagtttttatccaggccaaagacttccgcgcccagcgccgtgaataatttagccgtttcaaaaccgataccctgacccgcaccggtcacccacacacgcttaccggtgaaatccatttgtaccattgtgccagccattatttcgccccagccgccagttgtttctcaaacagtgcccaccagccatttaagcttggggatttcgccagatcgacaaaactcagctcaataccttgctgacgccattcggtcaccagcgccatgatatgaacggaattcaggccgtaatcgatcagattttcatcttcatcaaagtcttcgtcactttcgtcaatcagcgtcaggagctgtgctttcaagctttctttgctgaatctgttatcactttggtttgcttcacccagcagtgcctcagtgaaaatcacacttccgctacgcgtcgccacatatttcagcgccatcagatgctcttccagcgagaaatcagccaccgcgtccgccaccataaacggcttaatatctttcatgaaagcgtccgttgcagtaatcatgcagccaatgtggccgtagataccgcaaatcaccaactggtcacgccccatttccttcatcatttgttctaacggcgagcgatggaatgcgctatagcgccatttcaccaaaatctcgtcgtcttcttccggcgttaacgcactcactacccgctgcttggccggatgatcgtttaaacctgcgccccacatgtcattcagcagcgcccgatcttccgggctttgattattaggttgagcggtataaatcaccggcacaccctgacttttacagtagcggcgaatggcggcaatattgtcgatcacccgattaatcattgggttattgtcaccgtagaagctgacaaagtagtcctgcatatcgtgaatcagcagcacggctttggtcggatcgaactgccagcccactttatttgccggaacatgttctgcctgcggcagttgataagcagaaagagttggaatcgccatgaaaaaatccttattcactgatgctgatttgggtctgaatggtttgtcgcagtagtcgcttgtctatcttcccgaccggcgtaaccggtaggctatcgaccatttcaaatcgatccggcagcttgaattccgccaccccgataccacgcagatatttgcgtaagtggagcggtttgagactggcatcgcgagttaccacaaaggcacagcttttttcacccagcatttcatcaggcatcgacaccagcgccgcgtgaatgatgctttcgtgggttaacagcagattttctacctcttcggcggcaattttttcgcccccgcgattgatttgatccttctcacgcccaacaacgcacaggtagccgtcttcggtcatctgtactacatcgccagagtggtaaaatccttcatcatcaaaagctttcgcattatgttctgggctacggtaatagccgcggaaagtataaggcccgcgcgtgactaactctcccgcttctcccggcgcaaccggctgaccggcactgtccagcaccctaacttcatcatcggcgctgatagggcaaccctgcgtggtgaaaatacgctcgtcgctatcgtccaaacgggtgtaattcaccaagccttcggccattcccagcacttgttgcaactgacagcccagcatctgcggaatgcgccgtgccagcgattcactcagtttggagccgccgacctgcaacagtttcaagctagcgagatcctctgtgccaaaatgctcggcggcctgcagccacagagatacagctggcggaactaatgaggtcatggtgatttgatgacgtttaatcagtggaaagcagctcatagcgctaggctcaggagccaaaactacgcagccaccgccatagaaaatacccaatgcgccgggcgagctgagcggatagttatgagccgcaggcagcgcgcacagatagcgggtattttcatcgttttgacaaatatctacgctgcctctgacgctgtagtaataatcattgtgagttcgcggaatcagtttcggcgtcccggtactgccaccggaaagctggaaaaaggcgacttcgtccgccgcagtcggcgaaaaatcaggcaactcgccgtctaattcctcatacagcatggtctgtaacaatggcgcataatcattctcaccatcaataatcacaaattcaagagaaggcactgactgctgcaactgctgcgtaaaggccgcgtcactaaacaaagcgtggctggcggaggcaatcaacaggcgcggctgaatttgtttagcgtaagcattcagctccaaccgattgtggctaaataaggcatttaccggtaccacgccaattttcaacagcgcgaaatacactaaataaaactcggcgacattgggtaattgcaccaaagccgtatcgccatgtcccagtccctgaccggttaatctggcggccagtcgatccgaagcgcgattcatttcggcatagctgaactggcgttcgccgcaaatcaccgccgttgcctgtggacgcagttggcactgtctggacagcacgtccgtcagcggtaaatcaatccaataacctttttcgcgatattgacgtgcaaactccgcaggccaacgggtaaattcaatactcatggcaaacgtccctgtgattgaattcccaacgcattcaacatggtgcctagcttggcttcggtttcggcccattcaagtgcaggctgcgatgccatcacgattccggccccagcaaacaggcgcgcctgagtgtcatgcagcgttgcgcagcgaatcgctaccgcccactccccgttgccgtcttcatcacaccagccgacgataccgctgaataagcctcgttcgaaaggctctaactgattgattaaccgacgagctgattccgttgggaacccgcagagcgctggcgttggatgtaataggcaagccagttccagcaccgaggtttgggcactttccagctcgccgctaatagctgtagaaagatgccacagtgcagcggtgctaatcagtgaaggctgcgtcgggatatttaacgagcggcaatacggcgtcagtaagcggcgaatttcgtcgataaccaaacgatgctcatactgatcctttccagaattcattaaggcttgagaaaccacatgatcgccttctaccgttgcctgacgttttgccgaaccggctaaggggttggtgtaaactcgatctccgtccttacgtaccagaagttccgggctggctcccaacaaaacgccgccttcactcagaggaatatggaaatgaaacgcgcctggattttggcgtaataagtgattgataacccggttaggattgatcggtgtctcggtttcaatctctaaaattcgcgacaataccaccttatgcattgcgccccgacggaaggtttcaaccgcctgagcaaccgcctgtttaaagtcgtcttcattaggcaggctgcgccactgagcgacagaaaccgggtcttctgatgtatctgatgcagcagaaaccaattcctgacggtcgagaaattgataggattgaggaatgaatagctgggtaggctggctaatatcaaagggaatggctccgacaacgataggacgttgcaggccatcggcgcgcgctttgataaatgccttctggatcgattcttgcagcgtaccggggtattccgcaccgccttgtgctcgttgagtaattcgttccgccaccccctgtgtttttatactccgatgtgctgaagtgaataaaaacgctgaggaagtcgctgaaaaaagtgagttatccaaacgccctgcagtgccactgtgtgccacaaaaacctccaccacgatgtaaatagtaatgttaataataattactatcattcctctttaggcgtgataaattacgacgaagcagtgacattgtcaatgtatgtaaatattccattaattattttttcttatatggacaagtcaggaaaataggagattcaactaagccatgtcccttttttttcgtagcattacgcagaaaacccgccgcgtagcctttccggcctttttatgcctgctggctcttttgggcttgagtggatgtaaaccggcggatgaaacgcccaggatttcccctacgcccccagccagcgaaaccaatggtcaatggccccgcacggttcataccgccagaggcgatgtgcagcttgagaaagcaccgcgacgcattgtttctacaagcattacgattactggtactttgctggcaatcaaagcgccggtgattggtactggcgcaaccgttcctaacaccacggttgctgacgatctcggcttctttacgcaatggtcaaaagaggccaaagcgcgcaatctggtacctatgtaccaaacagagccgaatgcagaagcggtggccggtatgaatccggatttgattatcatttcagctaccggcggcgattcggccttgaagttgtacgagcagctttcagccattgctccaactctggtaatgaattacgacgataaaagctggcaggaactggcgctaacgctgggtcaggcaaccggccacgaagccgatgcagagcaagtaattagcgactttgccaaacgtctggatcaggtaaaaaacagtattacgctaccgccgcaaccggtttcagcctttgtgtatcaggctggagggcagaccgccaacctgtggacggcaaactcggcgcagggaaaattattattggagctgggctttacgctagccactgtccctgaatccgtactgggtaataccagtatgggacatcgtaaagatatcattcagttaggcggagaaaagctagcggaagggctgaccggcaacaccttcctgctattttctggcgacaggcctgcgattgaggcgttggaagcgaataagtttctctcccacctagcgccactccagcagaaccgcgtttatgcgatgggcaacgatactttccgcctggattattacagcgccagcaatatgttgcagcgaattgaggggctgtttaagaaggattaggtttgattttgatcttaagagcgtatttaagctactgaaggttggaattgggttcagtttcgtaagcccagcagttcactgtctcctcacttgccgtggaggcttccgagcagggttggcgcgaaagtggggttctgcgaacgtccctcgggcgcgcttgtcaggcaagccagcgctagattcgcctgcgggcgttatcaggatgccatgccatcctggccctgcggctcaaggcgcgctttcaacagctgacggctgttcactcttggcctcatccctgctcggcccacttcctgattgcgcctgttgagtgcaaaaccagtgttcttacgaatcacaatttgcctttcgtttttgatagggcttttgaccttgagtttgatttttcagagcacatttgagcggctgagacgatgagtgagggaacccacttagtgggcaggcgatacgtgcggaggcgcggattgttaaggctcgcgcttacgagccttaactcgattgaggctgttgaggtgagatattcaccaatcgaataccaaccccttgcccccgccccgcggccgctatcacaaggtaagcaaacaaaaattaattctctttcgtttcctctacactcatcttcacgtcctcttgctcagcactccccatcgaagcctgacgcaaaggctggacgcaaaccgcaataaccgcccctaaacccgcagcagcgaccccataggacaacgcagctaaagccggtgtcatcaaacgcgccagcaaacctaatcccaatgcgcccaaagactcaccggtaacaaactgcacattccacagactattaactcgccccagtaatgcgtccggtgtatgactttgaaccaaagtatattgcagcaatccgctgatcgaacccagatagccatacaacagcagccccggtaatgccagatagaaattattagtcaaacccagcgttgcgatagataaaaatgccgctatagacgcatacatcaacaccaaaccgggacggcgaacctccgcgacccaaccgctagtaaaggctccgatagtcgcccctaacggcactaccgaatacataatcccaatctgcgaggcaccaacgtgataagtattttcagccagcgcagggaacagcacgcgaatcgctccgaccatgcttaccaatgtccccaacaacacgaccgagccaaccactttattgctcaatacgaaggaaataccgctggccaaagcacgcagcgggtgttcatgctgcgtcaccgtcggtttcatctgcggtaaacgcaacagcggcagcagcgtcagcatcgtacccgtagccgcaataccgtagttccaacccactccgccgtaaacaataatcagaccgccaatagccggtgaaagaattgaccccaaacgcacggtcagcatactcaaaccgcccgccgccgccagattttcacgtccaaccagcgatggcgtagccgccattaacgccgtcatgcccaaagcgccgaaaaaaccgtcccaagttgccagcacgtacagcacccacagtgaaggcgtggcggcaaaagcgtttatactcagaccaacaaaacccaaaccgcaggtaaaacgagcgaataaaatcaaacgacgtcgatcgagacgatcggccaatacaccgcccaacagcagaccaataaacatgcccaagccatctaacgtgacggctaaccctacctgcagggtggatccggtcatcgcctggatttgtaccggcaccgcaacggtaagcatccccaagcctaatactgagatcaggcgagcaataaataccgcccgaaaatttgcattgttctttaacaggctgaaatccagaagaatgggtgactttgccatgattatctaatccattaatgtcgacagaaatgctgccggacatggccctattgaccgaaaaaagtgtattgtcacgcggatactcgcagaattttgctgatgtaatccaataatgactcgtgctaacatagcgcaaacaaataataatgataatcaaaacgataacaataatcattttattaaagaagaatcgttatgtcccttgataagacactcaacatacccgttgcggctagccaatcgggccgcttctctaacgaccgtcgtcgtgtattcggtttatttctttgcctcactctactgctgattatcatggcctgtagcctgatgttcggtgccaaagccattcctctagacgtggtatggcgcagcttgctgggggaacacagtgggcaagacagtaccctgattttggaatcccgtttacctcgcacgttgattggcgtattggccggagcggctttggggctttcgggcgcaattattcaggcactgactcgcaacccgctggccgatcctggtattctcggcgtcaatgccggagccagttttgccgttattatcggcattaccgtttttggggctaacgccatcagcggctatatgatttttgcgtttgtcggtgcaatgcttaccacgctattggtttattgggtcggaaccttgggagccggcggtgtgaatccgttgcgcctgactttatctggcgtcgctattggcgcggttctcaccggaatttcctccggcatctctctgactcaccccacggtttacgacagcgtccgattctggcaagcaggctcgctggatattcgcaatatgtcagtggttaccgcagtcacgttgccgatcgtagtcggcaccttaatcagtctattgctggcgcgtccgttgaacgccatgcatatgggagaagatctggcggcagctttaggtgcgcatattggccgtactcaattctggtcagtcgttgccgtaactctgctgtgcggcgcagctaccgcagccgtcggccctatcgcctttgttggcctgatggtgccgcatatcgcccgttggttggtcggccccaatcaatgctggattctgccttttacgctggtgatgacgcctatcttgctgctgttctccgatattgtcggccgttttctggttcctggtgagctgcgagtttccatcgttaccgcctttatcggcgcgccgctgttaataggattagtacgccgtaacgcaaggatgaccgccctgtgaaatcaatcactcaaccttggattattggccacagtgacggccggataaatctgcgcgtgcgtccacgcagtttgttgacctgcgccctgttgctgctggcctgcctgatattgggcgcgctagcgttaactttcggcacgctaaaactctcgaccaatcaggtggttagcgctctgtttggtcaggccaacggttatatcaataccatcgtcattcagtggcggctaccgcgagcggttatggcgctaattttcggagcagcgctaggcatcagcggcgctttgttccaatcgatgatccgcaaccctttgggtagccctgatattattggttttaactccggtgcttatactggcgcactggtggctattattctgttcaatggcagctattttgagattgccagcagcgccttaggcggcggtttgcttgccgctgcggcagtgtatttactggcttaccgtcagggaatacaaggattcaggctaattatcgtcgggattgcggtcggtgcaatgctgacggcatttaatacctggctaaccattaccgcctcgctggaagcggctctcagcgcagcagcctggggagccggttcgctgaacggcatcacctgggccaaagccgcaccttcgagcctattcattttattggctacgatgctggtggcgttgcttagccgccgtattccgctgctagaaatgggtgacgatgccgccggcgccttgggcattcccgttgaaaaaacccggctcgggctaatggcaattggggttattttgatggcagcggtcaccgccgccgccgggccaatttcatttattgccctggccgccccacagattgcccgccgcctgaccggtacgccttcggtcacgctcattccttctgctttgatgggagcgttgctgttggctgccgccgatttgtgcgcccagcatctgttttcacctaatcagctaccggtgggcgtggtgaccatcagcatcggcgggctgtaccttatttggcttctaattcgcgagtcccgccgatcatgagtaatctgtatgctaaccctgtaaacaccgccgaaaaccgcctgcgagccaaagccgtaaccttaggttacgaagggaagatcatcagtgaaaacctgaacgtttctatccccgacggcgaattcaccgtcattgtcggtccaaacgcctgcggcaaatctaccctactgcgggcgctaagccgcttactaaaacctcaggctggcgaggtaattctcgacgggaaaaatatcgcccgctatgacactaaacatgtggctcgccacctcgggctactgccgcaaacctcactggcgccggacggtatcacggtcatggatctggtcgcccgaggtcgttatccgcaccaaaaactgctccagcagtggacacaggcggacaaactcgcggtactcgaagcaatgcaggccaccggcgttagcgagctagccgatcgcacggttgatgcactgtccggcggacagcgtcagcgggtctggatcgctatggttttggcgcagcaaacaccgctgttgctcttggatgagccaaccacctatctggatattgctcatcagattgaattactggagttattcagcgatctgaaccgcgaacgccagcacacgctggtggccgtattgcacgatctgaaccacgcctgccgctacgccacccatattattgccatgcgcgatggtcaggtggtgacagaaggcgcaccgcgcgaggtcattaccgctgagctggtggaaaaagtattcgggatgccttgtctgattattgaagatccggtttcccataccccactggttattcccaaggggcgagtgaagaataaaggataaataggttcatttggcgctgaaatggcaaagttgggggcaaaatggattcctatgggaaatatattttttcccataggctatttatacaaattttgagcgtatgtcgcgcatatcattgatggaatccatttaattcatggtaattatcaattaggaagaacctatgccacagataacatcaagcgccttcagtagccgacttgcattttttaaccaactgaataataaacccgagacagaaagccgctccagcggaatgggaaaactctctcagagttttaccggcgtgcggaatagcgcctcgtctcaattttttccccgcccaaaaactaccgctgatcaaactgacggctctttccgttccaacctaaatgtgcgccaatccgctaacggcgaagccccggcagcccccatgtccaaaagagtctctattctggatgtcatgaagctcaaaatggaagcagaagggcaaccatttgacagttttatcaacaaacttaagtcggtaaaagtgacagatgctccgcctccgattaaacgtcaggaacttgcacctgcggctccgatagcggcacctattgctccagtgaatgttagctttcaaaacggtgtgattcctccgcctccgccgcctccgatgttctccgcgccagtgaaggccaaatatgtcccaacagagataaagccggccagtaaggaggatattgccaatctggcggctgcgcagttggctaaagtggcgaagaaatcagaacctaaacaccagatgccagcagattttatggcagcattgctcgcaaaattgccgaagaagattgaataaccagtggctgagaaacaacagaaaaaagcagtgactcactgataaatcctctggttaaaatagtcgttagctaaagatagaaaatattcaggccagcatattcgctggcctgatgtttatgagttacggcagtctgttacggttagcagtcacgcttattttcccaaactgccgatgtcactcagcaattggtttagcaagggacccagcactttgagcgtttccggcgacatcatggtgatatgggaacaatcaagctcaaaagtacgcagattcttcacatacggagcccagatctctgccggtgtttcaccttcaggctgggtttgcgtcgccacaaacagcgtggtttcgccgtgataaaccgccgtggtagccgcagataacaggccaaccgaatcgtcatagttagcctgaatctgatcgaacattttacgcttttcttccagctcatcgccggtagccgccataaatagctcacgctcacgttccacttcagccaatgcttcggcttcaattggcgcattccagtcctgagtttcaggcgggtaagtatcgagtaaaccgaggaatgccacttcctcgccctgttcctgcaattttaccgccataccctgagcaatggtgccgcccaatgaataacccattaaatgataaggccccgtaggctgaatgcggcgtagcgttgccagatgctgttcgcacatttcatccatgttggcgcattcggcgatagcgccgccgggacgcggcgattgcagccccagaaccggccatttacctgacagataacgcggtaactggctgaactgccaagcaaaacctgaagccggatgcacacagaacaatgacgcaccggagccttgtcgcaatgtcatcacttcgccaaaaccgatttcattctggttttgtgactgtggctggctcagcgccgctgccagaccagcaaccgtagaagcaaccattacctgacccacggctactggctgtttcaattcacggcgcaaatctgccgctaaacgcatggctaacagagaatggccaccggcagcaaagaagtcggtatccgcacccacggaatctaccccaagcaggctggcaaacatttccgcaattcgggtttccaatccttcagccggagctcgcccgccgttatctgactggctagccggtgctggcaaggctttgcgatccagctttccgttggcgctgagtgggaaggcctccagactcacgataaccaccggcaccatatgagcaggtaaacgctcagttaacgcattacgcaggacttcggtatcgacttccatctgtccggcagtcggtacgatatagcccaccagttgacggctgtcggcaccggccagaacgccttcagacccgaccagcgtgcgagctaccaccaccgcttgctgcacctgcggtaattccaacagcgcagattcgatctcacccagttcgatgcgttgaccgcgaattttcaactgatcgtcgctacgtcccagatattccacctcgccgttagccaaccaacgggcaatatcgccagtgcgatacattcgctgaccgcaatcgaaaggatcggcaacgaagcggctggcggtcagatccggacgcgcatagtatccctgcgccaactgcacgccgcacagataaagatcgcccgccacacccacaggaaccggtcgcaatagatgatcgagaatacgcagctcagtgttccataccggtttaccgatcggcacactattgccagtgatccgcgccagatccgcgccgtaagccggttgataagtgacgtccaccgcggcttccgtaggcccgtacagattatgtaacggcgcagagaaactttgttgatacaactctgacagttcgcgggaaagcgcttcaccactgcagaatacccgacgcaggctggtgcaggttcgtccctgcccgctcatggcgctgacaaaagcagccagcatggaaggcacaaaatgagcggttgtcacgtcgtaatcttccacgatcgcccgcagcgcttccggatcgcgatgagcctccggcggagccataaccaatctggctccagtaatcatcggccagaagaactcccacaccgatacgtcgaagctacaaggggttttctgcaataccacgtcatcactgcctaatggatactcattttgcatccacaacagtcggttaacgatggcaccgtgagaaaccactacgccttttggccgaccggtcgatcccgaggtataaatcagataggccggatgatcgggggtgatagaaggcgcgacaaaatcctgcgccgcaggccaaggctgagctaaccgatccagtaataacaaccccccctgaccggcgaagcgctccgccagatcgctgagagttataattaagcgtggccgggcgtcctggatcatgtaagccaaacgatcgtccggataaccggtatccaatggcaagtaagccgcaccggcttccagtatcgccatcagcgatagactgagatccaccgagcgtggtaaggcgaccgccactcgatcgccggcgcgcacgccctgccgctgtagatgagcggccaacgcggtcactttttcacgaacctgttgataatttagctgctgatggatatccaatagcgccagatacagcggcgtttcctgcgcctgctgaaccatcaggtcacacagcgtcaccgccggtagcgctacgccggtattattgatttcggctagcagggctttctcatccggcgtttgcagatccagcgctgacaccggtaattccggctgataaaccagatattccagcaacataaccaaacgttgtgccacccgctgtggatcttgtaccacatcgcgatattccaactgcaactgcagtttttcccccggaagcgccagcagcgccaacggataatgtgtatagccacggttatttagaccggcgcaacgcaggccgtggaatgcctgttgatgtaacttactgttttcaggatagttctctacgactaacagcgtatcaaacagcgtgttagcaccggccaggcgctgaatttcccccaacccgagcccatcatgctccaacagctgaatttgctgctgttgcaacgcgtttagttgcgcgagtaatggcagatttggctgtaatttaactctgaccggaatggtattactgaacaaacctatatgttgctcaataccttccacttccgcatagcggccggataccggcgaaccgaataccacatcgttgcggccactcagtgcgcccagtaaagtcccccaaaccccttgtaacagggtgttcagcgtcaaaccttcccgacgcagcaaagcgaccaatcccgccgtcagctcgcagcctaactccaccgccaactcccgaaccggacctgatgagttagcttcagggtaaagaatcgagggcgttgcgcccagcatcgcctgttgccagatctgacgatcctgctgaagatctcgctgcgtcatttgattgattagcgaaccgtagctaactttcagtggtgccaacggcagattgccgtaagcatgcagtagatcatgcagcatgatcgaagatgaccagccgtcaccgatcaggtgatgagcaaccaggatcaatgcgtgacgatcggcggtatagcgcaccagtaccgcttccaataacggacacgggctggcggcgatcaaatctttcgcgagcaagctacgttccagattatggaactccacggcctgccgatccgccgtcatttctgacagatccagcactcgccacggcacattcatttgagttgtatcgatcgtcggcagaatttgcagcggctcactgtgcaattcagtgtcaaagatcgccgccaactgtggatagcgaaccagcaacagctccaacgcgccgcgcaggcggtcagcatccaacggcccttccagctcaaaacggctcattgcgttgtagttattcgcctcacgacctagctgggcgtggaacagcaaaccttgttgcagcggcaatactggcagcaccgcgctgacagcaccgtatttctccgtgaccgcggccattaccgtgtctggcagtttaccttctgccgtcggtttacccggtgccctctcgcccataggctgcaacgcctgcgccattcgcgccggagtgcgttgagagaaaatatctcgcggacgcaattgataaccttgccggcgcagtgccgtacccaacgccatagcggaaatactatcgccgcccagtgcgaagaaatcatcatccgcgccaacctgttccaaccccagcagatcggccgtagcctgacaaatcagagtttcttctggcgtttgcggtgcacggctaatttgctgcaccgcgcgttccggtgcaggcagcgcctgacgatcgattttaccgtttaccgttagcggcaactcatttaacaccaccaacaccgctggcaccatatagtctggcagggtcgcggcaagctgttccagtaactggctggaaagctgcggattagcattcagatccgcatctggtaccgagcaatagccgattaaacggtgggtagctccaatagcttcggcaatcaccaccgccgtgctgacctgcggcaatgccaccagcgcattttccacttctcctaattcgacgcggaagccacgcactttaatctggtggtcaatacggccaacgaaatcaagctgtccctccggcgtccagcgcattaagtcgccgctgcggtacatcacctctccctcacggaaaggattcgccacaaagcgcgccgccgtcagatccgggcggcgcaggtagccgcgcgccaaaccggcaccggcgatatacaactcacccatcacgccaaccggcactctctctaacttgttgttcagcagatacacttcggtattagcgactggtcggccaataactggctgatcggaaactcgcgtactggttcccaaggtgtcaatggtgtattccgatggcccataatagttatgaacgtttaattccggatgttgcttaagcagattccacaggcgcggcgtggccgcttctccaccgatcataatgaaggccggacgatgacgcccgttttccagcagaccactgtcgatcatttgagagaagaatgacggcgtgatatccattgtatctatgggtatctcatccatcatttgcaccaatgaataagcgtcgcggcgcatttcttcgtcgaagatatacagctcacagccgatcatcatccagaacaagggttcccaggaggaatcgaaggaaaacgacgcagtgtgtccggcacgcatccggcggcgatgctgccgagcaaattccgccattgccgggccgtataaattatcggcatgcgccaccagcagattgagcaggccgccatgggtgctcatcaccccttttggtcgtcccgtggagccagaagtgtaaataatataagccagatgcgcaccactgagcgcttcacgccgttcggcgtcaacgacaggttgagtcggtaatgccgcacattcgctgcggaaaacctcgtcatccaggcttaacgtcacagcgagttgcggcaattgctcacggatgctgttatgagttaataacaggcaaggacgcgcgtcatcgcacatcaattccagtcgatccagcggatagtccagatcaagcggcatataggccgcgccgctcgccaacacccctaaaatagccaccagagaatcgaccgaacgtggcaaacctatcgcaaccacatcgtcagcaccgacgccgcgagcaatcagcgcccgcgccaattgcgctactctaaccgaaagttgctgataactaagacgatgctcgccgcaggctaccgcgcaatcctccggctgctgggtaacgcgagaatggaaaatatccagtaccgaaaccgcacgggcaggcatggaaatcgccggtccgttggcccattgaacgatagccgccagttcctgcggatcgatcaatgacagttgcccgatcgccacatttggctggcgagcgatctgttggatcaaatattgaatacgctgagcgtgtaaacgcaggctggccatat
